United States Patent Application Publication US 2019/0144922 A1 - sequence listing, part 10

SEQ ID NO: 4 - DNA, 5974109 bp, Klebsiella oxytoca (residues 1,991,371-3,982,740 of 5,974,109)
  misc_feature (5617061)..(5617061): n is a, c, g, or t
tgctgatggcgctgtcgtttatcttcggcccgctgcgtagcgtaccgatgggcgtcagagtggtgaccgggatcagcttcggctttatcttctacgtgctggaccagattttcggcccgctcaccctggtgtacggcattccgccgattatcggcgcgctgttgccgagcgccagcttcttcttgctgagcctctggctgatgatgcgtaaaacctgacgtcacgcgcccccttcctgaagtcagaaagggggctttttttagcgtttccgcccgccaagtaagcttcccagcattcccctgactatctggttggtgacctgacgcaccgcgctcctggccgccgtttgcacaatgccgtcgcgtttgccgccgcgcggcccggtggtgccgaacagaatgtctttgagcccgccgagcagaccgtcgtcatcgccgttttgctggccttttgcgggcggtgattgctgctgctccgttgtgctctgaacgccctgttgcagcatttcaaaggccgattcacggtcgatctcttcttcatattttccgtacagcgccgagtggttaagcagcccgttacgttcgtcatcggtgaccggccccatacgcgagcagggggcgataaccatcgcgcgttccactatcgaagggctgcctttctcatcaagaaaggagatcagcgcctcgccggtgcccagctcctggatcgcctgttcggtactgaacgcgggattcgcgcgcatggtctgcgcggcggtttttaccgctttttggtctttcggcgtgaaggcgcgcagggcgtgctgcacgcgattacccaactgaccgagaaccgcatcgggaatgtccgccgggttttgtgaaacaaaatagaccccgacggctttagaacgaatcaggcgaatgacctgctcgattttatccagcagcacctgcggcgcatcgttaaacagcagatgcgcttcatcaaagaaaaagaccagctttggcttctcctggtcaccggcctccggcaggcgttcgtaaagctcggagagcatccacagcaagctggcggcgtacagcttcggcatctggtaaagcttttcggcgctcaggatattaatcactcctttaccctcagcgtcgacgcgcatccagtcctggatatcgagcataggttcgccgaaaaagtgctccgcgccctgctgctccagggttaataatccgcgctgaatcgccccaacggaggcgctgctgatgttgccgtactggttctgaaacgctttggcgttgtcgccaatgtattgggttatggcgcgcaggtctttaaagtcgagcagcagcagcccgcgatcgtcggcgatacggaagatgatattcagcaccccagactgaacctcattgaggttgagcaggcgagccagcagcagcggcccgagatcggaaaccgtggcgcgaaccgggtggcctttttcgccaaaaatatcccatagcaccaccggattggcgtgcggctgccagtccgttgcgccgattttttccagacgcgcctgcagcttttccgaactttgtcccgactcggcgataccggtgaggtcgcctttcacatcggccataaataccggaacgccgatttccgagaaagactccgccagcttttgcagagtgacggttttaccggtccccgtggcgccggtaatcaagccgtggcggttggccatagcgggcagtaaatgcagctgtttatccagcgtgcgtgcaatcagcagaggtgagctcatgagcgatttctccatttatcctgctgcgagtataggcaacctgatagcaaaaggagggaaatcacgcacaccttcgcttattcacgtcaggcgcagtggcgctgaattaacgcgatgctctgttcgatttcgcggcggatatcgtcttcgctccagtttgccaattccggcgcgaagggttcgaacgcatacacgccctgatagccgcgcgcctccaggtttttgacctgctcgcagctttgcagctggtcttttgcggtcagcatgatgcgctcattgtcggtaagggcttcgcgcgggcgggaatcctctacgccggaaagatggaccagaccgatttcgccgatatccacctggttaaactcctgctccgcctgcggataaagatgatgatggaaggtatctatcagcagcttaaacggcacccgcgcgtcgtggatcagcgtttgcgcctgcgccgaggagcggagcgagctctgcgggaaaccgagcggctccaccagcccctgaataccgtagaaggcgaatagcggcgccaggtcacgcagggcgttaagggtttcgctcgccggaacctcggtaccatcgttcagcgggcacagcaccagcgatttggcgccaacggctttggcttctttcagcaatgactccgtcaggctacgaacctctgcggtgcggcagttgaaggggtagaccgcattgatagtgaggatctcaatatggtagcggtcagccagctctcgcacctgctggtggctcaggtcgtcggttacttttccgctggggaggtcgttacgtagctcgactttgttcaaccccaggctgttcaccagccggaaaaaggcctcaatgctgagtgacggggcgatcttgcggttgatgcagaaacgttgcgatgcaatagccattttgactctccagaaatgtagggatcggattcgttcgaatacctcatagtcaaaacatttattccaaaattagcaatgtatgaaatggtgattttttgagccgactcgcaaaatatttttctgctgcgttttaaagagcacgggttgcaggtggcgctaaatctcaactctttttatcgtgctttagtccgcaagccggcaatttcttacacgaaattgcgaccatcatcaccaaaatagaatttcactagctatcaatattgaaatattaatttcattttactacggttacagcacagcagatccagtaatgggccgtactgcgttggcccccgataccccatacagatgaggcgagagcatgactatcacaggaaactttattggcgggaaaaccgttaccagcggcagcagcaaaacaatgccggttttcgaccccgcgacgggcaaagtggtccgcgaagtcacgttatcgaccgcgcaggaagtctctgacaccattcaggtggcgcgtgatgcttttgaaagctggtcgcgcaccacgccgctgcgccgcgcccgcgtgatgttcaattttaaaatgttactggaacagcacgctgaagagctggcggggattatcgtcagcgaacacggtaaagtgttttccgacgcgatgggggagctgacgcgtggcatggaagtcgttgagtttgcctgcggtattccgcacctgatcaaaggggagttctcatcggatgtcggcaccggcgttgatagctattctctgatgcagccgctgggcgtggtagcgggcattacgccgttcaacttcccggcgatggtaccgatgtggatgttcccgctggcgctggcctgcggcaacagctttgtcctgaagccgccagcgctggcgcctactgccgcggtgcgtctggcggaattgctgaaagaagcgggtctgccggatggcgtctttaacgtcgtgcactgcagcaacgaagatgccgagcagctataccgggacccgcggatcgcggcggtaagctttgtcggatcttccggcgtggcggagcatatttataaaaccgccagcgcttatggcaagcgggtacaggcgtttggcgcggcgaaaaaccacgcgattgtgatgccggatgccgatcttgatgccaccgtgaatgccattatgggcggcgcgttcggctcggcgggcgagcgctgcatggcgctgccggtggtggtcgccgtgggtgatgaaacggcggataaactgattgcgcgcctgaagccgctggtggaatccctgaaggttgggccgggctgtatgcgcggaaaagaagagaacgaaatggggccggtcgtctccgatacccatcagaaaaaagtgctgggatatattgataaaggggtcagcgagggggcgacgctggtggttgacggacgcaagccgcaggtgcgcgggtttgaagagggatactacgtcggcggaacgctgttcgacaacgtcacgccggagatgactatctggcgcgaagagatttttggcccggtgctggggattgttcgcgtggcggattaccacagcgcgctggagctggtgaacagccatgagttcggcaacggtagcgccgtctttaccagcaacggccacaccgcgcgtgaatttgtccatgatgtccaggccggaatggttggggtcaacgtaccggtacccgttcccatggccttccatagctttggcggctggaaacgctccgtattcggcgcactgaacgtccatggcccggacggcgtgcgcttctatacgcgtatgaaaaccgccaccgtccgctggccgcagggtcagcaaaccgtatctgaattcagtatgccgacgttaggctaatcggcgaaggagagcgccatgtctttactggctaaagcaaaaaaagaagggcagattcagcacatcaccccgcagagcgcggggtggaagtacattggttttgatgtctggatgttaaagaaagggcaaaccgtcaccctggaaagcggcgatcgcgaactgtgcctggtgctggttgccggcctggcttcggtaaaaaccacgcaggcggatttcccgaacctcggccagcgtatgtcgccgtttgagcggacgccgccctggtcagtctacgtgccgccgcaggataaagtcgaagtgacggcagattctgacctcgagctggccgtatgcagcgcgccgggtaaaggaaccttccctgcacgggttatctccccgcaggacgtgggcgtagagcatcgcggtaaagggcgtaaccagcggctggtgcacaatattctgccggatagcgcgcaggcggactgcctgctggtggtggaggtttacactgacgaaggggcgaccagctcatggccgtcgcacaagcacgatacggcgctgccgggacaggaaacccagctggaagagacctactaccaccgtttcgatccgccgcagggttttgccttccagcgcgtctacaccgatgaccgcagccttgatgcctgtatggctccctacaaccacgatgtggtcatggtgccgcgcggctaccatccggtggcggcgattgccggatatgacagctactatctgaacgtgatggccggcccggatcgcaaatggatgtttacctgggaagaggatcacgcgtggatcaatagccctgattatccccgccacgattagcatcggttgaggataaaaaggccggttagccatgcttaccggcctttttgatcctgttacccgaataagatcgtcgtcgcaattctgccacatccccggctcgcgctgcgcttagccgggctactggtttaccgtcgtctgcggacaagtagcccggataagacgtgtacatcgccatccgggagtcatgaaaaacttaagccagctgcaccccggctcgcgctgcgcttagccgggctacgggtttaccgtcatctgcggacaagtagcccggataagacgtttacgtcgccatccgggaggcatgaaaaatttaagccagctgcaccccggctcgcgctgcgcttagccgggctacgggtttaccgtcgtctgcggacaagtagcccggataagacgtttacgtcgccatccgggaataatgaaaagcttaagccagctgcaccccggctcgcgctgcgcttagccgggctacgggtttaccgtcgtctgcggacaagtagcccgggtaagacgtttatgtcgccatccgtaggcatgaaaaatttaagccagctgcaccccggctcgcgctgcgctcagccgggctacgggtttatcgtcgtctgcggacaagtagcccggataagacgtttacgtcgccatccgggaggcatgaaaaatttaagccagctgcttcgtctctgcatctttgctgctgttcagcgccagcgagaccgccagcgtctgggccaggcacagcgaggccacctgcgagcggaaaccatcaacctgcgcctcgcgcaccacaaagcagacgtcgctgaaggccgccagcgggctgacctggctgtcggtaatcgctatctgtcgtgctttacgctgcgcgccgagctccaccagttcaaccacttcccgagcatacggagagaagctcaccgccaccacgacatctttcggcccgaccaggctcagctgctcggtaaacatgccgcccagaccgtcaatcaggaacgctttacggtccagatggcgcagggcgtaggtcagataggaggcgacactaaaggagcggcgcaggccaataacgtagatattctccgcttccgccagcagcgcgaccgcgcgctgcagatcgtcgccggaggtctgcatcgccagctgctgcagcgcctgggtattgaccatggtgaacatattcaggatttcggtcggcgtttccggcggggttgcgtcatccgtcgtggtctggcggaacagacgcgcgcgctcggtatagttagccgtctcttccatcagatgctgcttgaacatctgcttcatttcgttgaagccgctaaaaccaaaggcgttagcgaagcggatcagcgtggaaggggggacgtcagcttgttgcgcgatagaggccacggtgtcgaaagccacgctattgctgttatcgagaatatagcgggctacctgtttcaggcgtttgcttaacgtgtcgtagcgacgcctgatttcatcctgcaagatggtaagttgggtcggattattggccatagattgcgctctgagaaaatgaaaggaatataatttccagtgtatcaaatgaagcgaatttttcatttactacgatgaaatacgcgattcatttcacgaagatccagaaaaaagcccgcatcttctgaagaggatgcgggcctgggcggaatcagccgcgggcttctcgccagtagccgatgagcgtgaggtagttgcgtttcacttcgttaatcagcgcctcgtcgctgagctctccctgcatccagcgccgtgaaggctggccaaaaatggtgcgtcctacggcaaaacctttgatcatcggatgcttcgccgcttcggcaaaaccggcgcgcagacggtccgaaggagcgtccaggccgaggattaagatcccgcggcaccagctatcttcgcgcgcgatcagtttgccaatcctttcccattccgcgctcgacagcggcggcagcttccaccagtccggctgaatgcccagctgatagaagtgctccagcatgtcgtggtagtggcgttcatctttatccgggccgttttccggcaggatgatttccagcagcagctcatgcccggacttgttgcacgcctgccagacctccagcagcagcgcatcctgttcggcgcgcagctcggccggatcggccggatgatagaagaccaggcatttcaccacgtgctccagcggccagtcgatcagttgggaaccgatgttgccgtgttccagacgcagcgggcgcgagctcggcatttcaatcggtcgaccaatccaccagcccttgccggtgatagcattgagcgagcgctggccgtaggtgccatcggcgaggatgccgctgcgaccgtcaagaccggcttcgtctgcggcggcttccgcggccgccagcagcagcagcttcagctgcggaatgcaggattcatcacgcccggtttccagcgccagatctgccagctgtttacggtggtcaaaggcgaaaatgcacagctccggccatgcctggcggcggctggtgacgcgatggagatggttgagacgatcgtcgatatccggacgcggcaccgattctgcccgcgacagatagtcgtcaagctcggctttggtcggcattgcgggcgcgcagccgtggcgtgaaaccaccagcgcgccgcaggcgttagcgtagcggcaggcctgctcccagccttcatcgttaagccagccgcgcagcagcccggacataaaggcatcgcccgcgcccaggacgttaagcacgtctacgcgtacgccctgctgcagcggcacgctatcccagctgtcgggaatagcgccttccagcaccacgcagcccatcggaccgcgcttgcaaaccagcgtcgctttcgtggcgttacgcacgtttttcagcgcggtcagggtatcagtgctgccgccggcaatatgaaactcctcttctgtccccaccactaaatcgaacagatgcaggacttcctgcagctggctggtcacctggccggattcaatgaaacgcgtttcaccgtcgcctaaagacgttaacccccaaagcaccggacgatagtcgatatccagcgcggtacgcaggccgtgacggcgggcgtactccagcgccttcagcaccgcttcgcgcgtgttggcgtgcgaaaggtgggtgccggttaccgccagcgcccgggaagaggcgatgtactcttccttaatatcttctggcgaaagggccatatcggcgcagttatcgcggtaaaaaatcagcggaaacgtctcctgatctttaatccccagcatcactaacgccgtcaggcgctgcttatcggtgatcagatattcggtatcgacgccggcgcggctcagggtttcgcgtagaaaacgaccattatgctcatcgcccacgcgagcgagcattgccgattttaatccttgaatggcggtgccgaaggcgacgttgccggaagagccacccaggtatttagaaaaactggcgacatcttccagcctcgcgccaatctgctgggcatagagatcgactgccacccggccaatacagatgacgtcgagtcgctttactgctgcattcatagctagggtttccttttgcatttctgctgtacggaagagtcgggataccgacagcgtctccgaaaacagcctgagggttattggttatctctagtttgagaaataaatatttcatttgcaaactagatcgaaattaaaaaaccaaaaatgtgagggatataccactatgccgcgctgagcctcattctgcctcggatcctgggctgcggctgaaagttgaaccagagcccgtttagatgcggtctttacctatgatttttaaggggatattaagaggtgggccgcgtaatttgcgcgttatcccgtatacaggatgcgaatgaaacgggtgaaatgcatagagagtttgatcgctctcgcaaaatgaaatattttttctgtatttttatttaatgaaaaaaatgtttgcctataatccagaagtattccagtgacgttaacgatttccctgactcatcgctgtatcgctgggcagggcaaaacgcgaacccacacgcaaatactgaacaataaggattgggcaacatgggcaaactgagactgacaatggcgcaggcgctggtgaagttcctggataaccagtacctggaagtcgatggcgaagagcataagttcgtcaaaggcatctttgctatctttggccacggcaacgtgctgggaatgggtcaggcccttgaacaagatagcggtgaaatgcgggtctatcaggggcgtaacgagcaagggatggcgcatgtcgccaccggttttgccagacagtccctgcgtcgtcagattattgcctgcacctcctccattggccccggcgcggcgaacatgattaccgctgccgccaccgcgaccgccaaccgcatcccgctgctgctgctgccgggggatgtgtttgcgacccgccagcctgacccggtgctgcagcaaatcgaacagagccacgatctcagcattaccactaacgacgcgtttcgcgcggtgagtaaatactgggatcgtatcacccgtccggaacagctgatgagcgcctgtatcaacgccatgcgcgtattgaccgacccggcggaaaccggtgcggtcacgctctgtctgccgcaggatgtccagggcgaagcctgggattatccggaatccttctttacccgccgggtacaccgccttgaccgccgcccggccagcgccgcgcagctggcggatgccgtggcggcgattaaagccagccgtaagccgctgatcgtctgcggcggaggggtgaaatactccggcgccggcgaggcgttgacccgttttgccgagcgctacggcgtgccgtttgccgaaacccaggcgggtaaaggcagcgttgtctcttcgcatccgtataacgtgggcggcgtcggcgaaaccggctgcctggcggcgaacctgctggcgaaagaggcggatctggtcatcggtctcggcacgcgtttcagcgatttcaccacctcgtcaaaatggattttccagcacccgggcgtgcgcttcctcaatattaacgtcagcaacttcgacgcctggaagctggatggcatcccgatgctggcggatgctcgcgaagccctcaccgccctggacgacgccctgtccggcgaatcctggcaggctggctggggcgagcaaattgaaagcgtacagagccgccagctgaaagagacccagcgcgtttaccaggcggtgtggcaggaaaccgctttcgtcccggaaatcgacgaccatctggatcgggaatcggtgtatcgcgaatttcgtcagataaccgactctaccctgacgcaaagcagcgtccttggcgtactcaacgaaacgctgccggcggatgcggtgattgtggcggcggcgggtagcctgccgggagacctgcagcgcgtctggcgcaaccgggccaccaacacctatcacgtggaatacggctactcctgcatggggtacgaagtcagcgccgcgctgggcgtgaagttagcccaaccgcaaagcgaggtctattcgctggtcggcgacggctcgttcatgatgctgcactccgagctggtgacctccctgcaggagcgcgcgaagatcaacatcgtgctgctcgacaacatggccaacggctgcattaacaacctgcagatggagcacggtatggacagcttcggcaccgagttccgcttccgctgcgccgaatcgggccagctgcagggcggcctggtgccggtagatttcgccaccgtcgctgccggctacggctgcaaaacctggcgcgtcacgacgctagaagaactacgccacgcgctggacgccgcacgccgcgaaaccgtcagcaccctgatagacattaaagtgctgccgaaaaccatggtgcacaaatacggcagctggtggaacgtcggcgtcgcgcagtctgcgctctccgagcggatccgcaaggtggcgcaaatgatcaatgaaaaacgcgctcaggcgcgggattactaaaacagaacacaaaccctgaaccctacaaatctcgggagaaaaccaactatgtcactcaaattaggtgtcatcggtgccggcgctatcggtaaagagcatatccgtcgttgcactcaggtactgcagggagccacggtagtggcggtttcggatatcaacgaagagaacgcccgcgccgcggttgcgctgccgggcgtgcatgccgaagtgtacgccgacggtcatgacgtgattaaggccagcgatgtggacgctattctggtcacctcatgggaccccacccacgaagagtacaccctggccgccatcgctgccgggaagccggtgttctgcgagaagccgctggcgatgagcgcggaaggctgccgccgcatcgttgatgcggaaatgaaggccggtcgccgcctggtgcaggttggatttatgcgcccttacgacgaaggctatctggcgctgaaaaaagtgatcgatgacggcgatatcggcgcgccgctgatgctgcgctgcgcgcaccgcaaccagtcggtgggtgaggattacatcaccaacatggcgatcaccaacaccctgattcacgaactggacgttctgcgctggctgctgaatgacgactatgtttccgtgcaggtgcgcttcccgcgctccacgtcccacacccacgcgcgcctgaaagacccgcagatcgtgtcgtttgaaaccaaaaaaggcacgctgatcgacgtggaagtcttcgtgaactgccagtacggctacgacatccagtgtgaagtggtaggggaaaccgggattgcccgcctgcctgagccgtcggctgtgcagatgcgcaaagccgctaacctgtcgaccgctatcctgaccgactggaaggatcgctttatcaaagcgtatgacgttgaactacaggcctttatcaatgatgttcaggccggccagctgcacggcccatcggcgtgggatggctacgcggcgtccgttgctgccgacgcctgtatcaaagcccaggaaaccagcgagccggttgaggtgacgctgccggaatgcccggcattctacaaacgttaatcccgctttgctgacggaacttctttgcacaggtaacgacgatgaaaattgcttttgacgttgatgtcattaaagacctcggggtaacccgaatggtccatcaggtggcggagtggggctacaagtacattgagcaatcgccgcacccgcagatcaacccgttctacaagcacccgcgcgccagccgggaaattatggctgagtacaagcaggcgctgcgcgataccggcgtggagctctcctcgtttatctgcgtctaccgctggtccggtccggatgagctgcgccgtcaggcggcagtgaaaaactggaaacggctgatcgaaatcgcggttgaaatgggtgttcaggtgatcaacaccgagttctccggcgatcctaaccagccggagatttgcgatgagatgttctatcgctccatggaagagctgctgccgatttttgagcgcgaaggcatccgcgttgaaattcaggcacatccgtgggacttctgcgaagagaacaacgaaaccgtcgatatcgtgaagtcgttccgcagcgataacgttaagtacgtttacagcgtcccgcatacctttttctatgacaaaggcgtgggcgacgttgagaagatgctgcgctacgcgggaagcgatctctcccatgtgctgatcgcggatacccgcaaccatacaaaacactgccgctatatcgttaacccaccgggcgtagatgccgtcgttcaccagcacgtgggcgtcggagaaggggatgttgatttcgacgcgctgttccgcaccctgcgcgatatgaaatttgccgagcagaccttcaaggtcggcggtgagccgattgtggccacctcgctgttcggctacccggaaaagatgaaataccaggcagtggaaacccgtgaactcatcgaacgtgaattgctgcgccggtaaggcgcagcggcaggagccccctactatgaacaaagataacgtaaaactggctatcgccccgattggctggactaacgacgatatgccggagctgggcagcgagaatactttccagcaaatcgtcagcgaaatggcgctggcgggctttaccggcagcgaagtcggcagcaaatatccacgcgatccggcggttctcaagccgatgctggatatccgcggcattcagatttgcaacgcctggttcagcaccttttttgctaacggccagcgggaaaagaccattgatgaattcgttaaccacatgaatttcctgcatgctatgggcgcgaaagtgatcggctgctctgagcagagcggcagcatccaggggctggaaaagcccatcctggagaatgcgaaaccgtgctttagcgaagaagagtggcagcgggtggcggaaggctataacaccctcggtcgtctggcggcggaaaagggcatgcaggtttgtctgcaccaccatatgggcaccggtatccagacgacggcagagatcgacaagtttatgtcgctggtggatgacaaagtcttcctgctctacgacaccggacacgcctggtattccgaaggcggcgaagagccgatgctggcgattctgaaaaaatatctgccgcgcattaaccacgtgcacctgaaagacgtgcgtccgccggtgatcgagcaggtgcgtcgcgaagggctctccttcctggacggcgtgaagaaggggaccttcaccgtgccgggcgacggcgtcattgatttccgtccggtgttcaagctgctggacgagcatggctataaaggctggatggtggttgaggccgagcaggatccggcgctggccaacccattcgaatatgccgtaaaagcgcgcaaatatatccgcgagacggcaggaatctaatcgttgttttattttcaggccatacgtcgtatggcctgctttttttaccccatcactcagcagtagctcaagacgtagaacgaaaacaacacgtcggtgaggcctcggcctctgcattcagactagagcaaatcttccctcaaacaaggcgggttactggagtctattatgtctaaggaacaataccttacactcaataaagcgtcgggaccgaatagcgagaccccgacaacgccctttgtaaaagttgtcgccctgatcgcgacgcttggcggtttactttttggctatgataccggggtgatttccggtgccttactctttatgggcaccgagcttcatcttactccctttaccaccggtctggtcaccagctcgctgctattcggcgccgcctttggcgcgctgctttctggcaatctggcgaatgcggcgggcagaaagaaaattattctgtggctggcggtgctttttgccatcggcgcgataggcacctctatggcgccggacgttaactggatgattttctttcgtcttattctcggcgtggcggtcggcggggcggcggccaccgttccggtctatattgccgagatagctcccgcgaataagcgcggacagctggttactttgcaggagctgatgatcgtatccggtcagctgctggcctatatttctaatgccacgttccatgaagtctggggcggggaaagcacctggcgctggatgctggcggtggcgacgctacccgccgtgctgctctggtttggcatgatgtttatgccggattcaccgcgctggtacgcgatgaaagggcgcctggcggaagcccgtcgcgtgcttgagcgcacccggcataaagatgatgttgagtgggagctgctggagatcaccgaaacgctggatgagcagcgcaatctcggtaagccccggttcagcgagattatgaccccgtggttgttcaagctgtttatgatcggtattggtatagcggttatccaacagcttaccggtgtaaataccattatgtactatgcccccacggtactgacctcggttggtatgactgataatgccgcgctgtttgccactatcgccaacggcgtagtctccgtattgatgacattcgttggcatctggatgcttggcaaaattggccgtcgcccgatgaccatgattggtcagtttggctgcaccgcttgcctggtctttatcggtgcggtcagctatctgctgccggagacggttaacggccagcctgatgcgctgcgcgcctatatggttctggcagggatgttactgtttctgagctttcagcagggggcgctatcgccagtgacctggctgctcatgtcggaaatatttccaacccgcctgcgcggtatttttatggggggggcggtattttcaatgtggattgccaacttcctgatctccctgttcttcccgatactgctggcgtggttagggctttcaggcaccttctttatcttcgccggtattggcgtatttggcgcgatattcgtaattaaatgcgtaccggaaacccgccaccgtagtcttgaacaaatcgagcactatctgcgggataagctggacaccagtgaagaagggcaggccgccagggcccggcgaataatggctgaatcgcaggcggataaagtgtaacgctgattgccaacggtatctgcaatgctggagcggtgctcagcggtctgcacggtccgggctaacgagccgtatcgaacgatcccctccccttgaaaagggggagggggcacactgcttccgtacggtattgcagaagatacctcagctatctgcggggatagtgagggaaaggcctacttcacttccgccagcgcggtcttatcgacgtagggcttcatcagcgcatcggcctccttctgcgccgcctgcaccgcggcttccggggtgactttggcatcgttgaccaccgcggccagctggttttccatcgctttacgcacggcaacggtctcccaggtggagtaccacggatgggcatacttcagctgttcgagggcgatagccgcgcgcggatcctgctgcagatacgccttcatttccggcgtatcgtaggcggccttacgcggggagaagtagccggtaaagcggctccaggcgccgttgacctgcgggctcaccagatacgtcaggaactgatacgccgcttttttctgcgcgtcgttgatgcccttgaagcttaccaggctggcgccgccgatcggtaccgcgcgctgctctttggccggcagcatcgccacgcccagctcaaaatctttgctgttctcgcgcataaagcccagcgcgccggtactcagcatcgccatcccaactttgccggagaagaagctggcgccgatctgtttcgaattcagcacgccggaaggcatgactttgtctttatagaccaggttctgccagaagcgcagggcgccgatggtggttggcgtgttgtaatagacttcgcccggatagtcctcgttaaagtatttcccgccgttggcgcgcaccagcgccgagaagatccagccgccgtaatcatcgttggtcgacggcagcatgatcccccactggcctttgctttcgtcggtcagctttttggcgtccgccagcagctcggcccaggtttgcggcggctgtttgatcccggcccgatcgaacatcgttttgttgtagtagaggatcggcgtcgagttatggaacgggatcgcataggtggtgcccatcacctgggcgtttttatgcattgcgggccagaacgccttcaccagaaaatcccccgctttttgatcgccatactggaacagctcgtccatcggcaggatctcatccttcagcgccagatcggtggtgaagttagcggacataatcaccagcgcgggcggctgcccggccttctgcgccgattcggctttgatcttggtggtgtcgtagttgccggtaaagatcccgcgcacttcgacatcctgctgcgactcgttgaattgcttaatgacgcgggtcatctccatggtcagcttgccgtccaccggcgccggaaacatgaagtcgatcttctctttcgccagcgccgcgccgctcagggcaaggctgagcccaaccgcgagagcggtgagaggtttaaacatggtctgtctccatcagtaaattatgctgtttctcagcatgaaaaagatgcacatcggcaggtgaaaagccgaggatcagcgaatcgcctttctccggcaccgcgccgcgatggcgacggctaaagcgtagggtgccgatgggggtgctgacgtggagcaaataatcggctcccatcagttctcgttgcagcacggtggcgggcaggcgcagatggctctcctccacgcggtcgctgatatgttccgggcgaatgcctaaccacacccgggattcttcacggtagcgcggcggcagcggatagcgcagctcacccagtaatacctcaccatcagcgcagggcagtgagagcagattcatcgccggagatccgataaacccggcgacaaacaggttggccgggttggcgtacagatactccggtcgcccgacctgctgtacgtggccgccgttcatcaccacgatgcggtcggccatcgacatcgcttccgtctggtcatgggtgacgtagacggtgctggttctgagctgctggtggaggtccataatgctgtcgcgcacttcgctacgcaggcgggcgtcgaggttggagagcggctcatccatcaggaacaggcgcggattgcgcacaatcgcccgtgccatcgccacccgctgccgctggccgccggagagcttcgccggtttgcgatcgagcagggtatccagctgcagcatctgcgcgactttatccacccgcggctgccagctggtcttctcctctttgcgcaccttcatgccgaaggtgatgttgtcgcgcaccgacaggtgcggaaacagcgcatagttctggaagatcatcgcgaagttgcgctctctgggcgacatttcggtgatgttctcatcgtgcagccagatctccccctcgctgaccggctccagcccggcgagcaggcgcagcagggtgcttttaccgcagccggacgggcccaccagcaccacgaattccccttcgcgaatatccagcgacagggcgctgagggccggtttaccgtcaaactgtttactgatgttttgcagactaagcatggcgtttagcaatcttccgttgggcagctgatattttcgtcgtacatccacggtccggcgtaatgggtcagaggatgctgatagctcacccactgctcgtcgacctggcgatgcatcaggcacgacgccggagagaggtcgtaatacggacgggtatcttcatgaaaatagggcacctggtggacggttcccgggatggtggagatgatggcctggcgatactgggtcatggtcaggctgtggttatggccgcagaaaatgcgcgtcagcgacgggaaacgctcaaccagcgccagcagacgatggccgttttcgcaggcgatagggtccatctgcgcgttgcccagcggcagcggcggatgatgcataaacaccgtcgccggtttatcgccgccatcaaacagctgggcttccagccacttgatggtttcctcggtcagccagcctttcgacgtacccgcccggctggagtcgataaacagcaggcgagtggcaaaatcgtctaccgcatagtgcatgttttgcgcgtcgcggccgagctgcgggcacagcggatgcaggtactccagaaacagcgctttatcgtcgtggttgccgggaatgagatacagcggatagttcaggctgccgaggatctggcgggcgacctcatactcttccgggcggccgcagttgacgatatcgccgctcaccaccaccgcgtccggacgctcctgcagggcattcagctgggagacgacatcggcattggcggcgttgacgtcaataaagccgtacagcttctggccgcggctgcggaaatgggtatcggaaatttgcgctaacagcatgaagagctccttatttgatcccggagaagccgaagcttcgcaggaactgtttctggaagaggatgaacgccagcatcagcggcaggcagaccatcagcgtgccggcgccgatgatgccccactgaccgccggattctgcgcccatggcgaacgagaccagccccacggtcagcacctgtttgtccgggtcgttcagcatcatcagcggccacagatactcgttccagtggtaggtaatgctgacggtggcgaaggccagcaccgacggccaggacatcggcagcagcacgcggaacagcacctgccaccagcgacagccctccatcagcgccgcctcttccagctctttgggtatggccagaaacgcctgacgcatcaggaacacgccgaacgccgaggtgaagtagggcatcatcaccccggtgagggtgttgagcaggccgaaggttttcagggtcagcatgttcggcaccatcatcaccaccggcatgatcatcagctggacgaggaacatcaggaacagcgtcttcttgccgcgaaactcgtggcatgcgaagacgtagccggcggtggtgatggtcaacagctgcacgaagaaggtgccgaaggtgaagataagggtgttggcgtagaggctcagccagtcggcgctggcccaggcatcgcggaagttatccagcgtcagcggcatacggggcagcagcgaggccatatcctcgccgaaggtcgtggcgctgaacgaggtcgccagcatccataaaaacgggctcatccacagcagcgccaggcagcacattaataccgtgagcgtaaagggctgcgagcggcgcaggcgcagccagagtgggcgcgatacgctgtgcgatcgcagcgccagcggcgagatttcagcgctcatagtgcgctcctttctccagcagtttgaggttaatcagcgagaaggcaaacagcccggccagcgtcaggaaggtggcggcggaagctttacctaaatcatgggtgtcccaggcgaggttctggatgtagtagagcagcacggtagtggcgttatccggcccgccgcgggtcatcaccgccacgtggtcgatctgggtgatggagtagatcagcgccgtggttatcacgaagctcagggtcgggcgcagcagcggcagcgtgaccttaaagaacacctgcgtgcgggtggcgccttccacgatcgccgcttcgcgcgtggaggccggaatgctttgcagcccggcgaggaaaaacagcatgtagtaaccggcgaacttccacacgccaatcagcgccagcgccagcagcgcgctattgctgcgccccagccagttgttgttcatcgggccgaacagcttcgccagatagtgatcgagcaggccaaggccgggcataaagataaacagccacagcgcggcggcgctgaccatcgggataatcatcgggaagaagaaggcggtgcgcagccagcggttgacgcggtgattctcggtcagggcgaccgccagcagcagggcgagcgtcacgcccggtaccaccgtcagcaggatataaagcagattattcaccagcgactgccagaagacgctgtcggcgaacagacgactgaagttctccagcccgacatactggccgccgtcgctgaccatgcgggtatcgaacaggctgtcataaatcgatcgcccgagggggaaccaggtaaacagcaataaaaacagtagggaaggcgacagtatcagccaggggagccaggtttttctcatggtggcggacgtctcattcaggcgtttgtagaagcccggattgtgagaaggattgactgcaaacgtatggcggggagatgacggtttaatgaccagggaaacaagcgccgggcagacgggccgcccggcatcaccccggtcagtggcgttcaggccgcgcggctgcggcctgaagcatgacgaggaacgatcagaagtcggctttcagcaccacgcggtagcgggccttgccctcgcgaacgtgcttcagcgcctcgttgatctgcgacatcgggaacagctcggtggtcggcgcgactttgctgcgtccggcaaatttcatcagcttgcgcagctcggccgggttgccggtggccgagccggagatgctgcggtcgccgccaatcagggtgaaggcggggaccgggaacggcttcattaccgccccgacggtgtggaagttgccgccatacgccagcgcttcaaagtacggctgccagtcgaggtcgacggcgacggtgttgataatcaggtcgaactggccggccagcgcctttaaggcttcgggatcgcgactgttcaccacgcgatcggcgcccattgccagcacttcctgctctttcgccggattggagctaaaggcggtgacttccgcgcccatcgcgtgcagcagcttgatggcgatatggccgaggccgccaatgccgatgacgccgacgcggctgttggccgtgacgtgatgcatcagcagcggcttgaagacggtaatgccgccgcagagcatcggcccggcggattcaagatcgacgttttccggcagcgggatcacccattgccagtcggcgcgcagcttatcggcgaagccgccgcggttgatgatggtgggcaccgagccttccaggcagttcacgtggttgccgctgatacaggcgtcgcagtggccgcagctgcgcgccgtccagccaatgccgaccttctggccaaccttcagccctttatcctgcgccgcgctgcccagcgccgccacccggccaatcacctcgtgaccggccaccagcggatagctcgacatgccccattcgttgtcgatcatcgacaggtcggagtggcagatcccgcagtactccacctgcacttcgacatcttccggcttaaggtcgccggcatcgtactcccacagcgacagatcggcgcccgcttctttggcggcgtaacttttaatagtgctcatgacagtttccttgggtttggcgtagttaagaaggaagtgtagagcatggggcgaggggacgcttggcagaaggaggggggaagcttgcgtaagccggcttctccgcgagagagaagccatcacgacagttcagcttttaagtaacagcgcgttgagccagatttcgctccgctccgggcgcttatccaccgtctgccacatgttggcgagacggatatccgccagcggttcgatcagcgccgtcagctctgcttcgtcgagatcggtaaaccgccgcccctctttttctcgctcgcctgaaccgtatttaaatgagacgtaccagacgccgccgggtttgagggccgtagccagtttgtgcatcactcccggcagctccgcggcgggaacgtgcagcagcgaagcgcagcaccagatgccgtcataccgcgcgttttcgctgatactttgaaaggtcgcctgacgcacggccagcccgctgtgttgcgcagcccgctcgaccattgccggtgaggcgtcaaacgcctcgacccggtagcccatatcggcaaaggctttggcatcgcgtccggagccgcatcccgcatcgaggatcagcccgttcggttcaattgccccgataaaaggcgcgtacagagaggtcatatcgacagcgacggttgaagccacaaagctgtcagcgttctgctggtagtagttgattgtcatcagaatatatccgttccggcggcctgaggttcccattcatgaaggagcgtaatgcgcgcagtgttccagattttggcgaggaagtcatcgcggcgggcggtcgtgttgccggtctgacggattaaggtttcacgcaagggaaggtggctggtaataaaatattcgtttctgtcgcgcaggcggcgcagcaattttgccgacggtacccgcataaacttgcctttctccccgcggttgcagctcttgcaggcgagtaccaggttccagacgccgttgatattcgccacctcgccgcgcgccgcccacgggataaagtggtcaacgtcggccaggttcgcatccccgctttcgagactgatcggcgcatagcagtaaaagcagcggcctttttggtagccgttcaggctgtcgcgacagctggagatggcaactcgtcgggtattcagggtgctgaagagctgctgttcggcggcatcatattccacggcgaacaggctgctggcgatgttcattgcccacgcctgctccaccagacgccagcgggcgtccgtttcgtggatcaggttctggtactgctggcgctccgtcagagaataaaagtcgtcggtcagacggatgccttgatgcgttttacgctcgtcgataaaaaagcgcctggcgatttcgccctgattcacgttatgaaatttatccagcaccacgctaaagccgagcttaaccgttgccgcgatgagctgatcctgggttatctcctggcgattgaagcggctacaggcgctgagaaactggctttttggcgacgtgatctgtttgggggcgtgctcaagatggcgacacagatgctggctgaacggcaccgccagctcctcgaggcgtatcagatcgctaccgtcgcggcggatatcgtacagcgcatgcgccagcgcaaacttataggaggcgacgtttttgccaaaaagaataatgccgcgccagtagttctccagcgtcggttcgatctgatagaagcgcattgcggaaatcctgttttgggaaagtaccggcgttattacgcgtactaataacaggatctgataacaaattgccgaaaatgtaaaccgaattgagccgtttgcaggattttgcgagcaggctcggagaaagaggaaaccgcgagtgggaaaggtgagaacgaggggtttatatctggaacgtattgaatgttggccgaaatgcggcttgcgctgtttttttcaacacttagcgtggcgatcgcactctgccgcttgcgcagcagccagtgacaggtataatccagaacgttttccgtatcctttccgtgccggagtggcgaaatcggtagacgcagttgattcaaaatcaaccgtagaaatacgtgccggttcgagtccggccttcggcaccatacgatgcaattaagtcgcctaagggcggctttttttatttctgaaatcagctagatactctaaattctgttcgtttcttgttctcataatatctgatggtatctgttggcatatcgcatgatacaggataccgatccgtatatcggaagttcgattttaagtggtatacggttttgagcaatgtgagcggttgaaagaggtaaaagcctggaaggtggggacgtcagggatgtgccaagaggggcgctgttaagtccgcactgtattcattagaagggagaatgtcagtccaagccgccttccagtcacacagttgtgaaagctaagcccatatgtccgctgagtgccaagagcggacattgtcaacgttttatataattcaatggtaacgtatatgatcttgacccaccatctccggacagcttttgtatcttaggttaacgatgcacgttgccgccggtattctctcggagagtgatatcccagcgcactgtgcgggtggttttcattgtaatgcgtgaacgccgctgcaaggtttcgcagggctgttctcacatccggtttcggcatgaacgcgatatagtcttccttcatcgtcttcacgaaccgttcggccatgccattgctctgcgggctgctcaccgctgttgtacacggctccagattcagctctttggcgaacctccgcgtttcatgcgcggtatatgctgaaccgttgtccgtcagccactgcactggtgtttccggcagcctgtcgccgaagcgcttttccaccgacctcagcatcacatcctgcaccgtcgaactgtcgtagcctccggtgcttgcagcccagtctatggcctctctgtcgcaacagtccagcgcgaacgtaacccgcagtttttctccgttgtcacagccgaactcgaagccatctgaacaccagcgcatatcgctttctgccaccgctattttgcccttatgttcacgctttggccgctctggtttgtcatgcaataacaacagattatgctcgctcattatcctgtaaagccgtttggcgttcacgggtgtcagcccctctgtgcgacgttgcttacgcaggatgccccacacacggcgatagccgtaactgggcatatcgctgatgatatcgaggagccctgacagtatttcagcgtctgcttcatcattacgccgcttacagcgcctgtcctgccagtcggcagaacggttaattcgcagtgacagctgcgcacgcgacacgcccatggtgcggctgaccagggctattccccgtcctttggcaacaagggcgcgtgcgctatccattttcgcgactgaccgtactccacagcttctttcaggatctcaacttccatcgtcttcttgcccagcaggcgctgaagcaaacacgcctgcgtgaaccgcgccatcttgagcaactgatccgttcattggatcagattgactggttcagtgcgcagaaagatggtctgggcgatctgtatgaaggtttgctggagaaaaatgccggtgaaaccaaatccggtgccgggcaatatttcactccacgcgtactgattaacagcatggtgcgctgcattaaacctcagccgggtgaagtgattcaggatccggcggcgggtacagctggctttctgattgcggctgaccagtatatcaagtctaaaaccgatgacctttatgatttgcccgccaaaggtcagcagtttcaaaagaacaaagcatttgttggcgttgaactggtgccctctactcgtcgcttagcgttaatgaactgcctgttacatggcatggaaggtgatgctgaaggtgtagtccatcaggggaatgcattaggtatggccgggcaggcgctgccgaaagccgatattatactggctaacccaccgtttggcacagcgaaaggcggtgaagccagtattacccgtgatgacttgacctatccaaccagcaataagcaactggcttttttacagcatatatatcgcaacctcaagccaggtggccgcgctgcggttgtgctgccggataacgtgttgtttgaggctggggtgggtaccgatgtgcgtcgtgacctgatgaacaaatgtaatctgcataccatcctccgtttaccgaccggtattttttacgctcagggcgtcaaaaccaatgtgctgtttttcaccaaaggcactgaagccaataaataccaagaagaaaactgcactgaaaatgtctgggtctatgatctgcgtaccaatatgccaagctttggtaaacgtactccatttggcgatagtcatctcaagccgtttgaagcagtttttggcgactctcccgatggtaatgcacctcgtcagcaaggagaatggagttttaacgctgaagaaattgacgcgcctgacacggcggaaaacgacaatgttgatgatcgcctgataaccagccgctggcgggtctttacccgggagtggatccgcgataccaaaggtgattctctagatatctcctggctgcgggataacagcagtgtggatgctgccaacctgccagagccatctgtgttggccagtgaagcgatgagtgaactggtgcaggctttgggtgaactggatgcgttgatacgtgagctgggagctggggaagaggcggataagcagaaagttctgctgaatgaaatgctggacggagtgaagggatgaatgaaaataaattgcctcgggaatgggttaatacaaaattagggaatatagttgattatggtcggtctgctaaaaaaactttagttgatgtgactgaaaatacgtgggttttagagcttgaggacattgaaaaagactcatctaaactcctttctaaggttagagtaactgagcggccattcaaaagcacaaaaaattgttttaataagggagatgttctctacgggaaattgcgaccatacctgaataaagtcatcatggctgatgatgaggggggttgtaccacggaaatcatccctattaatgcagaacctttttgcattaataagtatatatttttctggctaaaaagtccgttctttttacggtacgtcaatgaggttagttatggcgtgaatatgcctagactaggaacaaatgatggccgaaatgctcctttttatttggctcctttagctgagcaaaaaattatatccaataagctcggtagtctttgggctcgagtagagagcattaaatcccggctggaaaatatccctgagcttttgaaaaaatttcgtcactcagtattactttctgcagtaagcggaaagcttactgcagaatggagaaatgaaaataaaacatcagaatcggcaaaggaactggttgttcgctggattagtcttagaaaggaacggttttctatatatcagaatgaattgttggcgcttggtgatttaaagagaactaaaaaatttatagaaccacaccttcctgatatagaaactggaggagaattggttgttcctccatcctgggaaatagttagtgtttctcaaattgcagactgtctggatagccagagaataccggttaaaaaagaaaaaaggattaaatctgagggcctctatccatattttggtgctaatggtgaagtggaccgagtagatgactttatatttaatggtgattacgtactagttacagaggatgaaacattctatggaagagtgaagccaatagcctaccgttatacagggaagtgttgggtaaataatcatgttcatattctatctgccccaacaaaatcagcaaatgattatttatgctatgcattgatgtattataaaataatcccttggttaactggcactactgggcgggcaaaattgacacaggcagcattaaatgtcttgcctattggacttcctcctgaaaaggagattgaagaaatagttctgcgtattgaccaatttctttcctatgctgattccattcaaagggcggctaataacgcattagcacgaatcaataatctcactcaatccatccttgctaaagcattctgtggtgaactcactgcccaatggcgagaagaaaatcttgacctaattagcggcatcaacagcgctgaagctttattacaaaaaatctctactgagaaattagcgtcaggtacctcaaaaaagatagttaaaaaggttgttcgataaaaatagcccacatctgtgggctgttaattaatataaattataaaatgttttattttatttagatatgatctagtagttgatttgttattaacttttcgcggatattttccaaaatgcttgatgcttatcataaagctcaagcaaggcttcagcaaaagaatcgtcgacggtataaaaataacattcaggtacgtttaagaccttggcaaaagcgcagactgtctcaaatgaagggcgatgtgtaccgttttcataatgagacatcctggagtaggcggtcgcctcctctattcctgccataacagcgagtttctcctgtgtcaattttgctcttttacgagcttctttcaatcgcttggggatcatggatccatcttgatagtgtgccttgacaccatctttagcattccttaagattgattttctttagacttactaaagtacttacctttaggctgaacatatgggtttttatctgatttttgagagattctttaggtatgtaatcggtgggttatcacggggaattttttgaggaggagtatatgtacaggaaaactttaagtattattttttgtataccattatcttcatatgcagatgatcccggaggttttgttaatagacagctagcaaaagaccccgcgttagattatggaataggggatgtccatggacctgtaaaagaaatcattgagaggactacgaggtcagaagaaaaaaggatgattcgatatgatccggacgaaaacatttattatataaaaacacccagtaaggcgattcatatctcatctggttatccaaatcctcttcctgtaagagtggatatcgataatgcgtacaagcattcctcaccatcaagcaacttgatgaagtttgattattctttatatgacagagataaatatgggaatataaaatccattagatcatatctttatgataaaaataataaagagacaatatatcaaacaaacttgatatatcgaaagctagcatcaggagatatcgaggtttcatatgataaaccttctcctatcttgggtgaaataaaaaggtattataggaaaggatttgtaataaaggaaacatttataaatgccaagggagtgaatatttcaaactatcgttctgaaaatgtccctatggaaactgttatatatgaatatgagtttggaaaagataaaaaaactccattgtttattttgaagaaaagatatgttgataataaaagggtgacatataaaagttgggagaagtattcagaaagtggtaatcttataaagaccttttcctcatccttgaacaaccctgaagtcggagatggtgtcgagtatattaattataaatttgacaaatactctaactgggttgaaagaaataaatgtgctgttgaagacaagtggggtaagtactcatcatgtactctagagaaaaggacaattaagtatcattattgattctttcttcggtaccagtggtatgttacatttaatagcgattatttaatgtaatattccactataaaacttcgattccttattttatttgtaacttttatcttgaagttgtcctgtttttagtgtttatttatcctggtaaggattaatcttcttaaactcattaagctttatgttgaggccgctatgaccagaaaaaaacctgaagtaatatttactttttctgtaaatgataaaaacttcaaggatgttatgagttcttatcgtgggttagaagtcattgttgaatattatgaccataggattgatactttcaacagagaagtttcgcattggtttaaacctacatttggtacgagtagtttttcaaccgcaataatcaattttgtgaagaaagaatatcctgagattgatgcagaaaatattgaagtaaatcctatacttgatgaactgccctttgataatggggactataacaccttaggtttgcttcaaatatcaggactaacgatctgtgattggaaaaaaatcgctacaaacgttcagatcgacaccctttcagcatggcatggaactgaagacgagattgttttacacttttcacgtgaggttcccggtgagattatgcaatacgtgaaaaatttacatgggtggacatcttatacggggatcaccgttagtgcattggatgagggcatcgtcgaaaaatatggacttttatcgtatatcgataattaataaccctcacattatctttaattattaattagttaagtttagtccatgagtccggccttcggcaccaaaagcatgtaaatggacctcaactgaggtctttttttatgtctgaaatccagtatttatctacctttcccgctatattaactctctcaaggtctactgacatcaacgtacatctaccaacacatgttggtacagatgatggtatttccggttcgataatgcttgtaccaacagggaggggataagcatggcgttaacagatatcaaggtcagaacagccaagccaacggataagcaatacaaactgaccgatggcagtggtatgcacctacttgtccatcctaatggttctaagtactggcgtttgcagtaccgatttggcggaaagcaaaagatgctggctctgggtgtttaccctgaaatcaaactggcggatgccagagcacgtcgtgacgaagcgcgtaagctactagcgaatggcgtcgatccgggagacaaaaagaaaaatgataaggttgaacagagtaaagcacgaacctttaaagaggtagcgatcgagtggcatggcaccaataaaaagtggtctgaagatcacgcccatcgtgtgctaaaaagtctggaagataatctctttgcagcgcttggtgaacgtaatatcactgagttaaaaacgcgcgatttattagcccccattaaagccgtggagatgtctggacgtcttgaggttgctgcccgtcttcaacagcgcacttcggccatcatgcggtatgcggtgcaaagtgggttaattgattataacccggcacaagagatggctggggcggttgcttccagtaatcgacaacatcgcccggcgctggaattaaagcgcatacctgagttactcgagaaaatagacggctataccggcaggccgctaacccgctgggcaacggaactcactctgcttatctttattcgatccagtgagctgcgttttgctcgctggtcagaaatcgattttgaaacttcaatgtggaccatcccgcctgagcgagagcctattcccggcgtgaaacattctcagcgaggatcaaagatgcgtacaccgcatctggtgccgctttcaaagcaggcgctggcgatcctgaagcagataaagcagttctgtggcgaacatgagctgatctttattggcgatcatgatccgcgtaagccaatgagtgaaaacaccgtaaacagtgcgctccgggtgatgggctatgacactaaagttgaggtttgcggccacggcttccgcacaatggcctgtagttctttaattgagtcagggctatggtcgaaggatgcggtagaacggcagatgagccatatggaacgcaattcggtgagggctgcgtatatccataaagcggaacatctggatgagcgcaagtttatgttgcaatggtgggcggattttctggatgtgaaccgggagaaagggattacgccgtttgactatgcgaagatcaaccggggtaatggtgagtgaaatgtttattagtgttgtacctttgagtctaaactaaacgcggctgactaaatcaagtgttgcgttggtaggcagtgataaatagcagagttatcgccggggcaattcattccattgagtctcatcggaaaaaacaattcagcacaaatcaatatatagccatctggaagtatgggtggttatatgtttcgtgtttcattttaaaaagttctgaattgctagcataagactgccttggcggtcatctttagatggtggcaactatacagagttactgacaggcacgactgtttcaccatcaataaaatagttagatgaatcattgtattgggtctgtagtatcttatttagcaacttacattctctaggctgcggtatcattctcccaaaggcaataaagaacaagaacataattgcagcaactgaatataatattagatgcccccagataggaatttggtcatgcctgtaagtggataatatcaaagataaaattgcaagaaaaatgaattgcaacgaaaacaaagcatacatactgttctcgaaccagaaagaaaatcctttcttgaatataagagaaccatttttaaccaataaaaacgatctaaattttttaaagaatcctgtgggtattaactctctattttctatcaataggcgtagaattattttctgagtagcgacatcagaaattccagttatacgatagctgactattctctgaatatcctcctttatgcaggtgctaactttatttgatagtttatggttatccagaagatgttgcaactcgtttaatctagagttcttgacttcattaataaattctattattccccgtattttccagatgataagagccaatggccctgcaatgaaaataaagagaagaagctgttttatctgcaatgatccgcttgatacagcagcagtgatccatccatttattatatctaatattttatccatagcctaaaacccaaaaatgatattgtctgttatgggggaagttatcgttacaccgtctaatgattcgagataacttcagcctgttttaaaatcagctctaccgtacccgatgttttatccggcggatacttatacttgcgcagtgtctggcgcaccaagatacgcaaccgtgcgcggatagcagatcattttcaggccgagcgaagcaaattctcaacccacaaaacatctcggtgaccggccacaattcttcgagcaaaggccgacaactccgcactctcagaaatataatccgcaagagcacgcacatgttctgaaaacgaattatcgatatccacatttccagattctgttagtggaaataacctatcggcggcatcaatctttcgtgttattgaaacagcgagcgtcttgcgtttgtcaacaaggtcagagtgatccaagtggtaaagcctgattgattcagctgctcgcctattgcgaccgacgtgtttctccttcgaatatgtcggtataggcattccagtttcgtcaaaatctataaggccgggctcgtctggcttgcacgggtccaaaaggattgggctctcatttgcctcatctgcacagcaagttgcccgcttcttctcatcatgaaggggaaaattttctcctttcccccctgtcttctcgctttctttatccgaccgcacactgttgcagaatgtacatgcaaatctataattggaagggctaaaagccgaccacggatatttgctctttggacggaagtgatctactgctccatcagaccgttcctgcacaatctcgcaataataacacttgtcatgcgatagcttcattaatggtcgctttaggtcgcgccatacatcggaatgatctttaatttttccaggctcatctgcgatagcggcgtctgcacgcacctgccagctatctggtaattccaactggtccagattaatataccgcacgtatcaatcccccttcttattcaaggcattctgaattagacggcgagctttctcagcctcgtcaggcagctctttcctttcacttattggcatcgcctcctgatccagccttcgtaatgcctctttaagttcgggatcgcgcacctcatagcggaacccataagtttggagctcttcgttgatttccttcagcgttttcctgtcatcttcacttagcacatcctgtccgctgagatggcgcttcctcgcaagcagatcttgggtatgggtgtctagggccgcacttagtccaaacatttcactggtcatcacacccgcatagcccattccacgcgggtgcgtgtccggctccgcagccgagatcgcctgcgtatccttatcgcgcgtaagaatctgaacttgctccttctcaagctcagctacggcaactggattgtgcgttgccagaagaacgtgactactctgcttttctgtcccattcacattcagaaaattgcggatatgttgaagatactcgacgctccatcttgggttaaggtgcgtatcgggctcgtcgagcagaaacaggctttcctcttccgctgtgaagcgaagcaagcctagtacagttagaagttgttgttcgccttcgctcaattcacggaacgtaacagatccatcgtttttccgtagcttgatcctgattcgtacctcgtcgattaactcagaaacatacgtactttccaaatcttgaaagaactgggcggtgctcttacctccagccagcttgcgcagtgcaccaaggtctttcacaaaaagatacaagaactccagttttcgccagttccacaggctgaccttttccttgcgggtgatccgcaatggcgcaagagatatgtcgtaaagtgtcgctaagaaatcggatacgacgccacgtgcattccagaagcgtggatcgccgtcattggatgtccatgatggctgtctaagaacaaagagaacggattctattcccccctcttcaaggccgagctgttcctgcaaaaacttgtctgtcaactcggcgttattcacaatgaaagacagcaaaacaaaattgctatgaactggaagcgcatagaacagacgcttcaagccaggattttttccagcccgcaggtctctatcgtatcgttcgagatatttgagaaataccttttccatcctttcactttggcctgaataatagccaaatacaaacctcggcagatagccgtcatctggatctcgcaacttggaaagagccattgcttcgccaggggtttcctcaaaggtgatgacagcagaaggaggttcagcatcgggatcatatggtgcgagcttaatgcgatatggttctttgcctgctggatcggcatcaatgcgaacccatttatccttgatctgatagcaaattcgataagcaaaggacggtttgtttttgttccccttcccatcctcacccatgatcaggtcccggaaaagaactgtagctgcctccagaacattcgacttgccagtcccgtttctgccaatcaatacagtaatcaggtgcccctgagcgaagtcaatagtcaggtttttcaggttcttatattcaccaatccatagccaatcgatacgcatgatcactcctcactgatcggcatcagccttagccagtcttcatttcccctgcgctcgacctcaaggtcaccattttgcaggtgtatccgcagctcgttgtagaactcctcaaccgcatccgatgtcgcgccatcgccaatgcccaacgcttgtgctgcgtgactagctgaaacccaaccttttttggatttcataacctcaatcaaattcgccatcttcgccccttccttaattggcttgttgggatgcgctgccgccttgcgtcctgagcttgttttttcttttattggcgcgctttctgtttttatcctctcgatcaggattgaggcgggctcatcattcagattttgtggaacaagctttcccttgaatgctgtttgaagaatagacgcgtcaagtctaggaagctgatttgatgcggcagtgtattcgttagatacccggtctagccaagcaaaagcgatttcaatccgacggacaatttctgcctgttgctcttttggtggtaacggcaacggcgtgctgttgagctcttttttattgatttttggtagtacagttcgtccttcacgcaaggcagagaactgcgcgaaatcctcgctaacaagccaataaagcaaaaattttgcttctaattgcgaaccaacatttattgggtacatgtctgcgctgcaagcgccgtcaaagtcgacaagaaccgcttttcggagataaggtcgaatttttgaatataaaatctgccccggataaaatcgttgtttggcgcttgtgacgccgtcctctccaatcgtctgatatgacagaagcttcgccgtgccgctttggatattgttaggtgcaatatgcggcaaagcaagaatgctatccgggcgaaccaaattggcggcaacagcagctacctcctcaaatcttacccagcgccagtctgctggtaagttccagcatcggctttcgggtagggttgtttcgctctccatctttccgatcaatccgccgttaaaagagagagccaaaacacgcgccctgaatttttcaatcagtgctgggattttatcgagtgcatcgcgagcggaggccgttcgagaatttaactcatcaagcttggcaactatcctcttttgctccgcgagggggggaacagagacctttgcgtctaaaatgtgcgtttccgataccgcaggataaagcgttccactttgagattttgaaatagatgcgataaagccttcagaacgaacccaattgaacagatattttggtgttatcgcgttattggcacgaagtggtacaattccagtggtcgttaattcgccatctaaatcctccgttactagagcgatgtttttcagatatgttcttaccgttgcgaatagaacatcgtcagtgttgatcactctacgtgcacgggagggagcctcccgcccgaggaatttctttggctctgttatcttctgtatccgattatcaatggagccgatatcgacatatcgaaattgcctctcaggttgccgcctgggatcaatactctcatatggctcgacaaccattttcagtgtcgtagacgcccacccctttggtaaatcactcatgcccgccacccatgttacggcacagacatgttgccagtcgaagctgcgctgttttgaaccctttaatctccagtacgtctgctccaactaccaaaaccgactggattatttgcgtaaatttttccctcattgtcattcgttaacctcagaaggttcaatgagctctccgacgacggcttcaatttcattcattgccgattgaagatgagagaggatcagagcggcaatctcctctggagtttccgcagcatcctcggcatcaccgctttcatcgcgcagccaagaaatagccaaactatcatctcgctcagcaatttcccgtcgcgaaaagcaacggaaccggccagtttctccttgatctacgcgctttgacttaccttgcggatcatttccgaagcatttctcaaattcagagaagtgcgcatcgagcaacggcgtagttttcccgaatacgggcatgcttgaacgcaagtcataaagccaaacagactccgtattattatccttcttattgccaaggctaaaaaacagaacatttgtcttgacgcccgcgcttgcgaaaattcccgttgggagccgcagaactgtgtgtagatcgcacttatccattagatcgcgccgcactattctgccaacgccatcatctgatagcacattgtccggcaaaacgaccgccgcgcgcccacccggttttaagccaagatatatgtgctgaaggaaggccaattgtttgttggcgttgttgtgtgggagatcggtgcgaagcgatcgtctgctcccggccttgctcccaaatggcgggttcgcaagaataagatcggcgggcttgagcccatttgcgtcatccgtcagcgcatcgccgtatatgacctcggcatcgaggccattaagaaacgtattcatcaaacaaattcgacgggtatttttttcaatttcaacgccttgatatttcgggggcgttttctcatatgcctgtttcgtattctccgaacgaacaaaccggtccgctgcaattaaaaatccgccacttccaaccgctgggtcctgaattatctctcccaattttggtttcatggctcgcaccatggaattaaccagtgctcttggagtaaaatattgacctgctccagaacgtacatcctgcgagctcttttcgatcagcccctcgtagatgtgtccaaatctatcacccgacagatcattccaatcaattttggcgatgccatttactacggcgtgaaggttctcgtcgtgcgaaaacactgtagtgggaaaggcgtatattgcctgtatcgtttcactttctgcgctagtaccaaggtgggtcagcatctcctgatagaagcccagcaagccatctttaggatgacttaggaggtctttccagcggttgccagatggcagaagacgctcaacaccattctcttctgcaattttgaggaaaaggagatacgttaattcagacacgtattggtgatagctgatcccatcaccacgaaggatgtggcaaaggttccaaattttctgaactatattctcatttttcatatgttgcttttttcactctaaacgcttgaatgaatgcaaacgtaagcttgtccgccaagaacggctttctctacggcattcatccttggccctctggagcaactggcctgccgctggcattctcggtctgaccagcatgctttgatttctttgccgctatgtattccctcatgaactcccgaatgacctgcgcggcgggacgatcttgctcgcggcatatcttgagaaattcatcgcgaagctcccgctcgacacggattcgcattccggcatttttttctttcatggctccaagtgtagcctttggatacacatcaagccaagtcgaaattccgcttggagtcgaaattatccggaatttcgctagcgggcgttttgcggcatatgaacgtctgagccgacgcagtcggtccggcagcttcgttggcggcttctcgctgtttaagaaagggcttaccgtcgtcattaaggatgtttttaacgatcagattggccttcagggaatatttggaatgaactgtgtcaaagttgtttttgttcagattaacttttccacgctcttacagtggcacagactcctgaccgttactaatgtttgttaccaacggtacgaaagtgggtcttctgcaaattgcggtggaagaaaatcaatgaaactttttatttaacaacgacctagactgttttaagttatggataacgatatgcctttacttgagacgcttttgcaattgccttgcgggtggcaaacgacccggcaaaccattcagccttgatgactaaatggtttgccagcgataattacgatgcttcacgttctgcaagttcggagttactggcataagggacttttccagaaggtacaacctttgcagctgcgatcaaatgcacatcctgatcgtcaaagaaaatgtgtggcttaaacgcctttagaacttttgttttctctacaccgcccagaaaaaaagcctcatcgacataaactccccagcttctgagcgttttaatgacgcgcatttccgaagggctgtttctggccgtcaccagtgcaattcggacgggagaatattcaacgcgggttggcaatcgttcctgaagcttggctattttttttaaaagagtggcatatggcccctcttccatagggatatcttgttgcgcatcttcctgggcgtgaaaagcggccattccttgagtcttataaaccagctcgctttgatctgaaaaaaggactgcatcaccgtcaaaagcaatgcgcacttgcccttccgggatatcagatgcatcagaagggggatctttcaggattgcagcggcgcagaatcgggaatcaatcaccttttgcgcatcttcaacgttagttgttaaaaacagatccacatcaaaggcatcaaggtaatcggcaacggtttcgcctgcggtaaaagctgaacgtgtaatatcgagtttgtcatggcgaatggtattcaaaacgcggatacctgtatcaggactgttacgcgacatcacaacaacctcaaccaacggcgatttatcatccggctggcggtactggttcagacccagcaacgctttaactaaggggtagcctgttccgggctgtaaaggctggttttcgtgttccagcatataggcgcgatatttttcaatggcgctatcaggatcggtcgcataggtttcgcgaaacatacgatcggattcgctcatgtcgaaaagcgcagttgcgctgatgccgataactaaagtgttacttaaatctaaaggcattgttactttcctgaagtgaaatcttaaggttgtagaagcaaaacatcataacgcaaagaaagtatttcagccattagaagagttccacatcaataaattatttccactgggattatttttactaatcaacaatatcaagaatagatttacatttttcttttatatctaacttcatactttggaattcttttttaccacttgctaattcaccttccaatttattaatattgctttcatgcttggaaataatattttgaaggcacaatatattatctaacaataacgtttctttatttgcaatatcaagaagatatacttcatccgctgccacataagatattttaacgatgctatagctttctttttttatacctatcgcgattcttcgctcatctggaaatatcgttagaatagcaagatggatttcttttaatgataaatattttctgtactcctgacgcctacgctcgtagtaagaatcatttccatagtacaaatagctaataaaaatatcaccactataactttctgatatatgtggttggtaaggatttcctgcatgaagcttaaatgagtacacactaatctcatagccatcctcgactttttcgattaaagaatattcatcaaaacatgtttctgttttatctgatatatatgtacccattttcccctctatgtatttaataaattcttgtagtgaatgagtttaaactatcactcattaaatgtgaaaaaaccgccagtcaaggcattgaagagtttttcggtttcagccgttttatcatattgttttttaacaatagatgcatggaaatcaaccaatctggcaaaagcaagttgtttatccaatggaggtacaggtatcctgagtacagataaggtaccttggctaatattttgaatattcgccccttgccccccacttaacatttgctgtttcattgaaggtgtacggaagagaaagttaagatattctggggtgattgcaggcttttctatcctgtatcgaatacaaaatccactaaatgtgactttctctttccccggataaatagtaagacatctcccgactaaggctttattgccattagaccgaacaaagacaatatcaccatctttcaaaagatactcagcggaaggaggcgtgtttaattcaatttcaccgatattgtccatactggtaatcgttgctagtgatttgaaatcaccgactcctagacatttaagcatcgttccagattcacccttcgagaaattcatcccatttttaaatgaaccatattctaataaagaggtaacaccccatttcttcgggtttttaacgggatcgccaaatatatccaaaaaggtagtacgtaaaaaattatccgccagcttaatggcttgctcgcacttttggcgtataccatcggctttgtcgaggatagcagcaatacgtttttgttcttcaatcgatggaaggggaatacgaacctcagcaagtttctttttgttaagagtggcccccatcacagcattatctgtcatatctgaaaacgctaatgatttcatgacatggcttagatagatagtatctaatttatttttgttttttattggaagggccgcaattgcttcatttgtataaatatccgtctcagataaacaaactttcccaatagataatttaaaactaaataatactgtatttgctggaattttttttattccagactcctggatagcgagatcggtaatctgctcttttgtattcgagatccatttaccttgattcatatcagctatagataaccatctatgaccttccccccaatatctgctattactcctgctgggggtttttccgatatttatttcacaaacatcgcttaattttaccatcggccagctcacagcatcccctccagctcatccagatccgccagaatctctttttccagacctttcaaccgtttcagtatcaccttcggatcttcgtacacctcggcctgatacaccacctctttatagcgattgatagagaggtcatacttctgcgccgcaatatccgctttcggcaccacaaacgccgcctgagtgcgatctttaaaatcaacgccagcatcaatcccttccggttgctgctgtttcagcaacgaggctaatttctcgcccataaagttatcaaccggtagcccgcgcaaagtacggtaatgcttccagcttgccagcaaatgcggcaagtcgttgtcttttatcgggttgcgcttgtcatccaggctgtagccatcattttgtagatcgtaaaaccagacctcatccgtctgaccgcctttggtaaagatcaggatcgccgttgccacgccagcgtaaggcttaaatacaccggaaggcagattgatcaccgcttccagttggttatcttccaccagagttttacgtagagactgatgcgccttgctggagccaaacagtacgccctgcggcacgatagtggcactgcgtccgcctactttcagcatttgcagaatgcgcgccaggaacagcagctcagttttcttggttttcaccatcgccgacagcgtggcgtcgatatcttcctcatccagtgaaccggtaaacggtgggttcgccaatatcaggttgaaagcatttttgctagcctgcgggaagttggtgctgaaactctggctcatggtgtcctgatagtggatatccggctcttccacgccgtgcataatcaggttcatagcggcgatacgcagcatagtagtgtcaaagtcgtagccgtggaacatgttgttatccacatggtcacgccacggcgtcagcagatcaccggtaaagattttttgctcttccagctcaccgcgttcgttgctgccaatctcggtatggatggactccagcgagctgtatttctccagcaggtactcatagctggtcgccagaaaaccacctgtaccacaggctggatcgcaaatcgtctcaccacgcgccgggttcggctccatcatttcaaccattgtgcggataatgtggcgcggcgtgcggaactgaccgttgatcccggcggtggtcagcttgcttaataggtattcgtagagatcgcctttggtgtcgccacgatccagcggcaggtttttgatcacttccacggctttggtcagcagagaaggtttgacgatctccagacgagcatctttcataaagttgcccagcagtgtcaccttcgacgcatcggcctggccgagctggcggaaatgctggaatacgccgtcgcgcactacttccatcatttcatctgaaccgaggttactgtagtgactaaaacggaactcctgctgctcaggcgcaaagcgcggtttaaaatcaatacccgcgatttgtttacgtttctcgtcccgctgttcctgggtatccagcattcgggagtacatcaggtaggtgatttgttcgattacggtcagcgggttagtgataccgcccacccagaaatcttcccatagtccgtcgattttactttttaagtcaccggtgatcattgttaacgtctataccctgttataaatacaaaagccccgctgccggggcttgtcatgtgcgtattataccgttgctgcgtcggtcacaacacccagctcttcgactatcttttgcaaccgggcgatctgctctatgtcggggaacacgccggtaacgccttcgttgtggatatgtgtaaacggctgctcaaagagctgccgcatctcaatggtgccataatcacgaatatggtttttcagcagtgacaggaagcgtagttgctggctggtcaggctgttgtcagcagcgaactgcgcaaaacgtatttccaccgcgtcgctgtccatcccaatgatggtacgtaataatttatccaggctggcggttgcctgcgggtagaactcttttagcgcccggatatcgacgttcgggttctggatcagcactagctttgccagctcatccagctcgctttgcgtcactggctcgccgttgcggatttttttcagtaccgggttttgctggaatagcggctcaagcgccccttgaacctgctggcgatagagtttgaaatcaatcgagcggatgttggttttgcgggtctccgtctggatcaggttcgcatcttcggtaatatccacctgtatcgagccaaattttggcgtcgcatctttctccatcaggtgcattataccgcgcaaatgaatgcggatatcttccagttcttccagactggcctgcttccaccagcccaaatcacgaagctgattaatccgctgtccctgctgttgcacctgggtcagatgcggcggcagacgttccactttctcgatgatgaccggccagagcacatcaagctcttccgggttggtataacgggcagtttgcgccgccagaatatccatatcaaagcgcatggcatcgctttgcccgcgaacgtccagccactgcatcagcggggccaggacagatagcagatcctgctgtgttttcggggaaagctggcgcagcactttttcatcactgtactgcgctttttgctgccacttttcctgtacggcaatcgacttttcatccagcgcgttgatctgctcgcggagctggtgagcgactaaatccaccgcctgtttgtcgaacttacgctgtgcagcagcccccagcataacccacgcttcgaagcgtttttgcgccagcgattttgtcgctgtgacttcggcctcttcggtatgcaactcgtgatactcaaagttgccccagtgatcgaagatgcggaatttctgtttatccagcggtttgccgttttcatcattaccgtatagccccgaacagaggcgtgtaccacggccaatcatctgccagaacttcactttcgatttgaccggtttggcaaagaccagattcacaatttccggaacatcaataccggtatcaagcatgtcaacagagatagcgatggtcagctctttgttggtgctttcatccagccctttaaaatcgtcaatcagttgctcggcgcggggatcgtagttgtcgatgacctggcagaagcgtccggcaaactgcgggtacatgtcgtcgaacaattcattcaacagcagcgcgtgtttgtggttacgggcgaaaatgatggttttacctggcagctggccatcctgatctttcaggccattttccatcaggttacgcaggatatagcggttggtgtctttgttgtagatcgcttcatccagcgccttgccatcaaattctagcgtattgggatcgataccctgttcttccagctcacggatttgtgcgtcgcttaatttctcccgtttgatgccttcgcgcaggaattcagtggtgtgcgtaacaacctcatagggaaccaggttgttatcagcgatggcatcttccaggctgtaattggcggtagggatgcgtccttcacaaccaaacagaccgaaagtggttttactcaccatgtcgataggcgtggccgttaggccaatctggagggcatcaaaatacttaaacagatcgccgtagacgttgtagatagagcggtgggattcatcggcgataatcagatcgaaataaccaacatcaaaatggtccatgattttcatcatgccgggataggtggcgatgtagatcctggcattctgcctgtctgctttcttcgatttcccgaccacatacagtggctcattggtgaactgattgaaggcattcgccgcctgtttacgcagctctttacggtcgcaaagaaacaggacgcgttttacccagcgagcatcaatcatcagtttgcttagtgcaattgccacgcgggttttgcctgtacctgtagcctgaacaattaacgattgtcggtacttgttagtaaaccgttcgctgacgcgggcaatggtttcaagctgatacaaacgtccggcaacggccttaccttcgttgtcttttacatgcggcacactgttcagtggcagacgggtttcacgctgctgaataagatattgcaggctttccttgctgtagaaaccaaatactcggcgcgggggataaccatgagttttatggtcgtcccacagccagatatcgtagccgttggtgtagaaaatgactgggcgttgaccgtattctttttccagccagtctgcatatagccgagcctgaattcgtccttgctcggcattgacgctggttttttttgcttccaccaccgccagcggtttatgcgcttcatcccacaagacataatccgcataaccgtcgccagttgcagtaggctgttctttaacaggatgctcctgcgtaacctgatcggtatttttaagttcttcgcctacattccagtcagcagcaagcaggcgggagtcaatcaggcggcggcgggtttccgcttcatcaatagagaggatgtcggcaacatgctggttgcgagctctggcttcattcaggcgctgggtgaggtgttcggctttttcctgctcttgctggagtgcgcgttgtaacgccagttcgcgctcacggctttcatcctgagccctgattgcatcttccagacgtttttcatctgcacgacctgaagattgtgttaacggaggaagagaaaatttgggacagttatcaacattaccatgggcataacgaacatagagccaaattcccagtaaatacgcttccttgagcagccaataggtatctttagctttaatacgtccaccgtgcgcggcgcggttgccatggatacgcagtgcatccattttcatgatgatggcttctggcatcatgctggtgaagacatcggcgttcattaaatcatacagatttgctttgatgccttcagggagccgttcctggcggtataaccaacgtaccatcaattcggtgtagttgcgtagcttgaccagacagctttccggatcggagtgaacatatcgttccgccatacacgcgagttctgccagttccggccactggctgcgcaacatttcaaaattgagagactgctccatcaatcatcgccttatgtcgtggatacaacaggagttgtggaaaggatatcacactaaattggctgacaaagtgagcccagacttattcactaaacaacatgactgttgaatgctgccttatggtactgcactggcaacaatgataaagaaggcgcagatgaaagcatacgtttcagattgttaacatttacttgaacctcaaacacctgcgagcctttcaatatttttgtggaacaagcgaatgaacggttcggtactaattttcagaaatagtgtccatcgctttacgaggcctccctgacattgggcgttgtgggacttcattgcatccgtatgaacagagcccctctttttgctcctcttttgtcagatagctcaatactcgacgaatatttagaatactggtgggctcattgtaacgcacgggaatattgatatcggctttataaggctctttaaattggcagatattaaaatagcccccctgttgggttaattccttccagagttctcctgcctgcagcgcaaaaggataggatctttgcgttttatgtccatccagccagtatgctgtatgtgcatggaagccatggtctacagtccactcaatgacccagaaatagcccacaactgcagcttttttcatcattttattcatcaataatcgcaggtcacgctcaagtgcatgatgatcttgatgtaagtagtggcgggtattttttttataaaagaagtctaggcgtaatgttagtaaacaagaatatctggctaccattgcatcgatatgattattcagaattattgaaagaaaccagtttggattccatgatgggttatattggtgactgttattcataggttagacctgtttttaaaacgttgtttgatgatgagggagtgcagataaaatatcttcagtgtacgtggtaagggtaagtacgatacgtaatgatatttagtgaatagattggataggtactaaatgtaagcctgggaagagtattaattatactaaaaaacccaaattaaattatttgatacatttctagctacagctaattttctctatttaacctctgacattggaaaacaaatgttaattgatttttgcatgtttcattcgtcactaagatcaaggtcttttctgaaacttaataattatagtcctcttgagtttttaatccgttctgtcatccaggcctctacttcactttttagccaacgagaacttcggccaagtttaattggtgctgggaacgaattttcagaaattaatctatagaaccatttgtcggtcatattggtgtaggcagtgataaatgccatgtcgacaagctgatcattcaatactgaatttgaatccaaggttttagttaatggcaaagtcgtttggctggtcatagtgatgctcccgtatggtggtgttgagttgggagagagcctgttgtcgatgggagagtaacgggcatctatctcatactatgagctcggaagtagaaaattacatctgcctgaatcatacagcccattgatgtctctttagcatgatgcgcccattgatatacctgaaaattctttcgaaaaatgcgtatagtgtttgtcgataactacgagagtaaaaaatcatatcggcatagtaattttttagattttagccctctattgtgggcttgccctcagaattaacattacattaaactcactggttgacttcagtaaaaatacaatttaaatacttagtatggtgtttttaaatacaggtatttatcatgaataagaatgataaggatagtcatttagatgcttttgggaaattattctctaatgaattatcacagaaagaaatggtttcgactgaggggccatcaacttctgccagtcctgaaaataacaaggaaggctctttattgcaggcatcagaggtgaagcaacttcctggcggtgatagtaagcatgagtgcgcagatgtagatctttctcttgctactctggtggctgaaggaaatcaaaatgaccctgcgatagaacgtgtaatgcggcagatattggctcaggaaaatactattcctaaaaagcaagtcttaaatggaggtcaagatccctaccttagtgatgttgattttaggtggttaaaaggagatgccaatgagcgagctattttctggttttggatatatatccgcactgcatcaaatagccgtctcaatttgccagaattaaagttgcaaaatggctgggattcagaggatcattgtttatattctttttttagacttccggataatcccgtcagctccgctgaaaggagtcggttaattattaccttcttcaataaactctcgggtttcttcaatcctatccaaattaaagagtcattcgaacatattcgtagtatctggcttcacttgattagccctgttcgacaatttaaatggttaaagaaaaaagactctgagggtattgaatgggtgtgggattatttattaaaaaggaaggatgtcaatgataacatccttttttggtttaagcccgcagatgcaaatgagaaatatattgcgatcatgggggcaattgattgctgggttatacgggggaataaaattgattgtcaggataaaaaattacttctggataacatgaaaaaagcgtatcagcagcgcgggcgacgagataaaaagaaaagcttcaatcttaatactgaaatttctataaaaacccgtagagagctcaaagagctggttaaattgcatagtgttaatataaataaatttattgaaaggctgattgatgatgaatatgggaaatataaagacaatcctaatgaatataaaatatctttattaaagaaaaaacaataactccactaaatttcatgcttatattacttatgtgaatagccggttgagttccttccggctttgcttttcacaggagtaaacatgtcccaaacccccgaatcgcaggataccagtgatatcatgcgtacctgccttaatttcttaccccaacaaacgactgaacgtattatttcccgtctgcaacaggcaattcactacgagcccgtaattggcattatgggcaaaagcggggcgggtaagagctcgctttgcaacgccctgtttcaacaaccggtatgtctgaccagcgatttgctgggctgtacccgtgaaccccagcggatagtgctcaccgtgggcgagcgcagcatgacactggtggatttgcctggagtgggcgagacaccggaatacgatgcggaatattcggcgctgtatcagaagttgctgacggagctggatttgattatttgggtcctgcgtgctgatgatcgtgcgcgggcgatcgatatcgtcacgcaccggtcactgcttgcttatggcgcggatgcttcccgtttcctgtttgtcatcagccaggcagaccgcattcctccgttgccagaacttgccggacaggttgttccttcaacggagcagtgcctttcacttgcggttatcagttcgcagattgctggtcagttgccgtcctctttcccggtgatggctgtttcagcacataccggctacaacctgcatgctctggtggaactgatgatacatgcgttacctgtacaggccagtagcgctttttatcgccagttaaagccagaaaatcatacggaggagggtgatgctgctgtacgtcagcgttttggtgaaatagccggttcggcttttgacacggtgatcgcttctgagcatctgccttctggctggagcttgttgctgaggaggttgcgggaaaaactggtacagctcgcatcggaattatgggagaggatttttggctgaaccggacagactcagccacggacagatgtaaatccgttactttttataccttacggataagcttcgtttaacgtaattcttaccaatttcatagtccgggttccatgtcgccagattatgaacaccgattgcggcggcgcttaccgctcccagaagtgctgttggtgaccacagggagcttgcgaccgcagtgcttctgtattcggtgtatacacggcaggttaatttcttctgctgattttaatcgcgtactcctctctttcctggaatctgtgaatgtccctgggcatgcgccttagggtcaaacgttgcactttttcagggcagtgtatgtcagaaaagaatatatcgatctgtataaacgatcaataataagaaattgatcgttattatctatcaataatagctttcgatatccatgaattgatcgtcttaacctatcaaaaagtaaggatatcctggctcgtttcgcaccgtttcctgctcctttgacagatgttgactgattaataacttatgcagtggttctctcctgaccgctgctgctaatccacaggtgatttatgaaaaccagaacaataattgctctttttctctccgccgcctctgtctctgcgcaagcaggcaactggatggtgaaaaacggatggtgccagaccatgacggaagacggtcaggcgctggttatgctgaaaaaagacactattggtatcttcggccagttgcagggttgccccaacggtcagcaggaactgatgggaagccgtatcagcattaacgggaatctgatccccacctctcagatgtgtaatcaacagaccggctataaagctgttgaaatcgaaggtgggcaggctcccgccgcagccaggaaagccattgaatcaattgccggtcaggatatttccagcgtgcaggtctttggcacacaaatgaaatttagtcgtggcgatatgctccaggtttgcccgaaatatgtcagcgcccttgcaggggtatcagcagaagtcaccgggaacaagccgctgaaagtaaacaaaggttcggtaatgaaagcggccagacaggcgtacacgaaagaatatgaccgtgaaacggcagacgccgctgattttggcagctatgaagtgaagggaaatacggtggtatatgaagtctacaatgccgcttaccgcacctacgataaaatcgttgttactgtaggatctgatggtaacgccaccggggcaaaggtggagttcatggggcaataaccccctggtattgtttctgactcaggtattaaggccgtgcctccatcgggaagcatggcctttttgcttttatgccgacttactcattgcatcacccaccacaacactatccgtaaacgcaggcagagatgaatgtctcaccgcgttttaacgacctgatttaacgactcatcatcacgccagccctgaccggctggcttttttattttcggagtgattaatcatgaatactgcaattactgacgccaccttatcgtcagacactattttcgccacgcctgtcgcagatgaacagcgccccggcttctggccgcggcactttggcacgattccacagtggatattactggaaccgcgcatcttcgcctggatggaccgtttctgtgcggattacagcgggggtatctggaatttttacactctcagcaacggcggggcttttatggtgccggatactgacagcgatgcgcaatggcaattctttaacagcatgaacggaaataacgcgcaaatgagtgcagaggccgccggaattaccgtctgtcttatcgagtacagccatcatgcctgccgtaccgggtgcgatgccatgacagcgcacttttatcgtcttcgtgagtatgctctgcaccatcaggaatgctccgccatcatgcgcattatcgactgaggatacaggtatgactttcaacttattactaccgcaggaactaccgctgacaacccggcgaactgttcagcgtgctctgtcgctgcttgaacactatctgcgcgagcctggcgcttcattcacgtccacaacggttgtccgggactggctacgtctgaaaatgaccgggctggagcgcgaaatgtttctggtactgtaccttaaccagcaaaaccagctaattactcacgaaaccctgtttaccgggactattaatagtacggaagtgcatcctcgcgaagtggtgaaatcagccctgcgccataatgcagccgccgtgctttttgcccacaaccatccctctggtgaagctgagcccagccaggccgataggcggattaccgccagactggtaaaggcgctgtctctggtagaaattcgggtgctggatcactgcatagtcggaggcatgacagtggtttcatttgccgaacgtggctggttatgaaggagggcaaaagatgccactgactgatggcatacagtggggattaaagcgaagtttcacaccgaattttggcgcaaggctggtacaggaaggcaaccgactgcacaacctggctgaccgggccaatatcaccggtaaatttgttgatgtcgaatgtcagaagctggaagaagcattcccgcattttatccgccagatggaactgatgctgagcactggcgaacttaatccccgtcatgcgcacagcgtcactctctaccacaacgctttcacctgtgaagccgatactctcggtagttgtggttatgtctacatcgttatttatcccactcaacgttaaacctttttcacacgcgagaaaaatgaaaaccttacctgcaacaactcagcgggcggctaagccgtgcccgtctcccgtgacggtctggcagatgctacttacccgtctgctggagcaacattatggccttaccctgaatgacacgccgttcagcgatgaaaccgttattcaggaacatatcaacgccggtattacgctggctgatgctgttaactttctggtggaaaagtacgaactgattcgtatcgatcgcagagggtttaactgtcaggagcagtccccttatctgggcgcagcggatattttgcgggcgcggcaggcaactggcctgttgcggcaaagccatcatccttcgatacgctgaaacttgcgagccgtcttccctaattacatcaccaatcttttttccttattaactcattgcataatgcgcctgccattcccggtgggcgtgtttgctttttacggacaaaataccatgcaaacagaagctgaaattttaactgatcataatgagctaatttgctcgaccagtattgaacgcatcgtcacaggacgtaatgctgcgctgggtcagatagaaatgctgatccaaaaacttgatgagatctcccggctaacttccagcattggtggcaacgtggcaaatcactgggccatgcgtcaggggcattcatacgactgctggctggtgcagcctgtggacaaggcgatgccggtaattacccgtaatatcgatcgcagtatctggcgcgatctgatgctgaaatccgggatgttgaccttgatggatgccgaagcccgcagccagtgggcaaagaacctggaggagggagaactcccggcgatcagcgaagccaacatcctgagtacctttgaacaactccaccacaataagcaggacgttttcgaacgtgggattatcaatgtatttaaagggttaagctgggactacaaaaccaataatccctgttatttcggcaagaagattatcgtcaacaatctggtgaagcatgacagatggggctacagcctgaactggggctggcggcgcgatcaactggccgatctggagcgaatgctctatctgctagatgggagaagcattcctgataaccgacatgatgtctctgtccgctttatggattttgtgcgcgacaatccgcatcagcaggttttcgaggacgatttgtttactatccgctactttcagaagggcagtgggcatatcacgtttaagcgtctggatctggtggagaagatgaatgacattgtggcgaagcactatccagggatgttgcctgccaaatgagagataatgtgtattagtcgcgacttgatctgacggttttcgctggcagcacacaatcaaatctgacagtctactttgaacgaggagcggaaattaacaattgtccccaaagtctatagaggtattgctaactttaccgcatattaatcaatggggatcaggtcaattacacgcctgatggatcgtcgcaacaaggagaatttatggataatctaactaggaatcaacactttatatctcaggtagagcagcgcagtaattgcattgacgagagcagaccaaaagataagcagcgaatctacaaatttgaaattgcagatagagaaaatagcgttgttcgattgacaaatattgaaggcgttaagataaaggctaacctctcttttgatgatctatttagtttcgatgtgaaaagctcaagggtaagaaaaaatttagaggatttctttcaaaaatttgaaacggacttagccccagcaactggtctccttatctccgagtcaaacgttaactcaggaagcgatgttttgaaggacgcagctgaacgagtattcaaagcaaagttcatggggtggattagaaacccctatttaattgctcgaacaatagatatgtttaagggattagaggggatgcatccaactgatcctcttttactgagacacttctccgacatacgctcgggagcaaaacctcacttggccgaggtttgcgcaatgtttagagtgacgagtgagcagtatttccagtggctggagattctttttctggcgttaatgacttcacccggagccacaaaaagtatcttagagtcgacagttgagatgattgttgagtcacagggattaatgggccatgtgatagtagcaacctttgacgacactccgggctgcagagtcgctgtacctgatacaggttaccttcaaggcactaatgatcccaactgtaatatgtttctttttaatttgaatcgaagcgcgtttgctgcatttagtgtggtggacttgtcaaagcagacccttgtagagattcagccgcagatgaggaggcaagtagggttgtacaatataaaattctcagcacagcaccatcacaatgatatgaaactacttgaattttttaacgtactagccgcgtatcaagctcattctcatattttttgtgccgaccctaagatcttcggaattactactatttaatgagtacaattactttaagttgagtagtagcaacttccgcttttggcacggagctgtctgtcagattaggtttagatctgtgttgtagctgtatcaggccacatctgagctaatacaacacagttatgtttgtccgggttcgatacctaagaacaatgaattttcgtgttggtatctgtgttggtataaaatgaaaatgttttttattaactattttaaatcatgaggttgagtcctatgtgcgagtccggccttcgcacaaaattccccaatcagtccactaaaatacttttttgtatctgcatttcatcatttgaaaacctcctgttgaggcgtctgttcttctggctccgacatggctagcacagcacgctccccactttccacccgcgcttcctcctcacaccacctttcaaacagcctggcgaatctggcgctttgccaggtttctccaacctggcttaagataaagccagtgaccacaatagcggaaataaagtaaaacagtgaaaatgcgatagctgaatttacgcccccgctggccagtaacgattgtattgttgtccaccaggcgcaggcaaaaatgacaattgaaattagccagaaacctccgctaacgatgtgaaaatttttaatttttttagcatctacagaaaaatgattttcatcacaacgatataaggatgggtttttaaggaaactcattaatcgtacatcatatgagccgatatttttatcagcgataaaagcgatcagctgatgggcgtgccagacaggaagagtaatcccgatctgctcatacaaaaatttcatttgtaccgtctgatgcgtcctcgagagtttggtgtcgggtatgtcagcgttcgctatctcagcgattttattcagcacctctattttggtttcaataggtaccttttcaaagcgaatttttcgctttgctggcgggctggacatcacttttcccgcccagtcgatgatctttttagccacatataaaagcgcgggtagcaaaaccagctttgcaatatctatctcgttaatggctcccatcgttattcctttataaaatgaatacgcaatgaatttacagcaccgactttattttatgtagccctcattattatgagggcttcgatatggctaattcctgggctggctcctggtctgacttaatgccaaccgcccaatacggcccctgcccggaggccgttatacttaaagactgaagccaatttccaccgatgccgcactgcgttccccctcaccgtggtaaaccgcttcgatgttgttaccatcgggatcgagtacaaaggccgcgtagtaccccgggtgataagttcgctcaccgggtgcgccgttatcactgccgccgtgtgccagcgccgcctggtaaaaagcatccaccgtctcacgatccctggcctggaaagccaggtgatgccgtcctgttggcttacctgcggaaccggggctattaatcgatgaaacaacaagctcatcagcccaaaaataatcgtcgtaggtattcacgacagggatctcaaggaccgccagcacggctgtataaaacgctttgctggcctcgaaatcatttaccacaagctggatatggtcgataagcctgccgcgatgtaatcggtaagtctccatgatggtttcctcattcagtcgtattaacaggtagttatccgttatctaaaaggagcgttgtacggatttgatggatgagtacaggtccggagtggcgatatagagcatgacattaaaatcctgtttgtcaccgcaatcctgacccctcaaccccgtcccccaatcactccgataaactctctgacctgcttctgcttcctggccgacagcttctccaccctgcgcatcgcggcttccagctccggttccggctcaaccgccgtcagaacgatacagccctccattacccgcacctccacccgggtgccggtcgaaaaccctgccgccgccagccactcgcccttcatgatcaacgccggaacaagacgacgatctggcaaacgtctcacataactcaccgtcaactgacgcttatttttcggcgacacttctggatcaaacgaatctacaatacaatcagcactagtcatggttgctattctcgtgaaatagtaattgtgatcagcggtgcgggtgtgcgctaacacattcgcaccgcgctaaataacacctgtaaacctaaccagtaataaaaataaagtccagactttaatcggacataataaacgtctttaaccataaattaagaattaacagaatacgtgacgctattaattagcgcctgtggaaaatgcctttcctgatattgctgaaataaccgcaaagcagattcaaaaaacaaaagcgagataatgcgcgcaacaggatgcccatgcccaattacgggcaccccatctctttagccagcgtacccttccgggacttcaggcggcgggcgatacctgccggcagggcggaccagaacgagagcgtcggatgagtccgccgctcaatctcctccaccgtcacttgataatcacaaaaactggcgcttttgggcgtcgcttgatccagcaaaaacgccgcgtattcgcctttatccggactggagccgataaaaataatcttccagtagccgctgggaagctccacctcgggcgcggcgggcagggtagcgatatgccgttcgaacagcggcccggtaacggaccacaccgccgccacgtcgcggcgctcggcgagggcgcgctccttatcctccagccgcgcccacgccccctgattcaggtcggaggcctgcggggtgatattggaaagatagtttaacgcctgccagtctgcgctggcgccgagcccggcgagcggcgcctgatgcccgcgatcgaccgccaatgctgcgctggcccctttatatgccgcgggggcaagggtatccgcagcgggtaaatccggatcgcgcttccagctgcgcgaacgcccgctggccaggctggctttggtgattttatacgccacccaattagcgaatttgcgctggctgttgttattgagcgtataggcttcgcgaaccagcgtctgcgcgcttccgccggtcgggcagcccacttcacaatgatccacgccggatgatgcggcagcgcacgcggcggtaaaaaatagcgacggcagaacgctgaatactcgggatagcttcatattattgatgacgtcaaagaaaagatgaatcgatgcataaaagaaccccctgaatagccagagcggaattcagctatgaatcgcaaagatgaagtgagagcgtaaaaagagttagccggtcgcagctgcgcggaatatcacaagatgatttaacatcacggcggatgttattttgtgaacccagaaatgatgttgaatgaggtgaccagactctcaagcccgctattttcagccgggctgaacgggtgggaatatgctcgacgaagcgtaaagcggtgcggcatccatggcgttgtctgaaaaatgtcgcggcaggggaaaacgcttctctctgagcggaggattattcagactacgcggatgaccgattaaggagagaaggtatgaaaaaggaactctggagaggcgtgctggcactggccgtacttagcctccccgcgctggcgaaaacaggcgtttcattcagccacaaagactgggaagtggtatgcgataacacgctgacctgccgggcggcgggatacagcgctgaagaaggaagcggaggttcggtgctgctgacccgccaggccggagcgggcaccgccgtctcgggagagctgatgctggcggaggtgaccgacagcgacgttctgccgggcaaactgacgctgtggatcaatggccagccggcaggcgatgtgaagccagcaaaagagagctggccgctgtcggagaaacaggcccgggcgatcgttaacgccatcaaaggcagcgggaaggtcgaatttacaggcggggaggcgccgtttgtgatttccggcgaaggcgcttacgcggtactgctgaaaatggacgatgttcaggggcgaatcggcacgccgggcgcgttgaccaaaaaaggcgacaggccggaaaatagcgtccgggcggcgattcctgccccggtcattcaccgggtcatgcctgagaaggcgcaggagagagcgttaaccgcgcctgagctggcggtgctcaagccgaagcttctggccacgctaaataacgatgattggtgcgatcgcctccagcctgaggagggggaggaggctgaaaccatcagcctgactccgctggataacgcgcattccctgatttctgccttgtgctggcgggcggcctataacgagggatacggctattgggttgtggatagcaaacttgagggtaatccaacgcttattacggtttccggttctgagtatggcgacggcgagatttttatgagccagaaagggcgagggctcggcgattgctgggggacggcgagctggctctgggatggcacaacgttccgcaaaagccgtgaagcgaccacgggaatgtgccgctatcttcgcctcggcgggacatgggatctccccacctgggtgaccgaggttaaaccggcaaagtgaaatcacgcgaccagactctctcccggcacacacgccgacagagaggacagggaaggatcttaacgatcgtccgcgtagcgggatcgccatcgacagcgccagcggcgtcagaaaactgacgccttgttcaaaataacagcgcggctaatgtattgctaactcgaattagtttatgattaagccgttctgttcgttatggaaaatgagtttatggccaaaaccgttgagcaagtcgccagggcgctgggaatctcgattaccaccgtgcgcctggtgctgggtggcaaagctgagcagtatcgcatcagcgccaaaacgcagcagcgtattaatgattacatcgccgagaacgggctggtcgttaaccatatcgcccgcagcctgaagctcaataaaaccgagaccttagggctggtgatcccgcgtttatccaacctgtttttctccaccctggcggaaaagctcgaagcctgctgccgtcaggcggggtatcagctaatgattgcctgcacctacagcgacagcgagcatgaaaacagtctggttgaaggactgctggcgcgcaacgttgacgggctcttcgtggtgccctctacccgggaaacgcagctgcatcaccagaaggtagcgcgcaagcggccgctggtgctgctcgaccgcgattttggcgagagcgacgtgtcgctggtggtgagcgataactacaacggcagcaaaaagctggtgcaggcgatgacccaggcggtggacgtctcgccgattttttttatcgccggggatacccagcagccgtcgatccagcgtcgtctgcagggctacctgagcgagctgcccgccggcaaggagtggatattgtccgccagccataaccgtcaggaagagggcaaacagctgatgctcgattttctccgtcagcaccgcgagccgccgaaggcgtttatcgcctcctccctgcccattctggaagggacgctgagcgcgctgcgggaaacctacggctttattccgtcggatattcccatcggcaccttcgatgaacatcagatgctgggatttctgccgaacgcggtgtggtcgatgcgccaggatgaggacgcctgggcgcagcacgcgtttcatctgatgcagcagaagctgcagggggaaaatgccgatgtgaagatcaccgtgccgatgaccctgattcaccgcccgctgtcggtggagaagcagcggagccagtaaatgacacggcttgtgtgaacacgtcaatccccggctgcgctatgctggccggggctacagataccgcatcctgcgcgcgctggtagcccggataaggcgcgggcgccgcaatccgggaacccttaacgatccctcatcaagtcaatcgctgaacaaaccgcgccgccagcccggcgtccagctccggcggcaggccgctgatcccgacgccgccaatggccagcccgtcgacgatcaccggctcgccacccggcatcgccagcagctgcgggtcgttaaataccgccagctgcagggcgccggcgctgacctcttgcgccagcgttgccgtcggacggcgaaagcgcagggcgctccaggccttgcgctgcgccagctggcgcggtagcggtgggcagcgaacgtgcgcgccaaaggcgatgagctcgccctccggcccgacaaccgccaccgccagcccccgggttcgcgcatcgctttccgtctcctgtaaaaaccgcgcgacctgctggcacacgacgctatcgttcagacggatctggggacagagcgcgtcattgtccggcatcggcgatataccccctaaagtgcagatagaggtcatccagctcgcctttctgcgccgccgtcagcgctacaaacggctcgcgggtggggccggtatcgacggtctctttcgcggcaagatacttcgccgactggaacacgccgcgcgcgaccagctgctccaccacctcgttgatctgctgctgcaggcgctgcgcccgggcgatgtcgccctgttgaaaagcgctgcgcagggcgagaaacagctccggctgtaggttaaccgtggtgccaaccgtggccgtcgcgcccgccgcgaggctggaaaggaagatctcatcgaaaccgttaaaaaagactttctccgggtagcgggcgatcatccgttccagcgaatagaggttatgcgaagtatgcttcacccccagaacctgctcatcgccgagcagcgcgtcggcgctctgggcgtccagctcgacgccggtaaactgcggaatgttatacaaaatcaccggaatcgaaatggcgtccagcactcgacggtagtaggcgataatctcctcgcggctatatttgtagtagtagggcggcaccagcgacaccgcgctggcgccgtcctgctcggcgtgcttcgccagctcgacggcatcccgggtgcgcggcgtccccacgtgggcgatcaccggcacgcgaccgcccgccgactgcaccaacgttgccagcatctgccggcgctcatcgaaacgcagcaacggcccctccccggaggagccgcagcagtaaaagccctcaaccccgcgcgccagctgggcccgggcgatcgcgtccagcgccgcgtagttcaccgactcatcggcgtgcatcggcgtcaccacggcggagataatgccgcgaaaaacctgccatttatcgcttaccatgcggtccagcctccatccaccaccacgttggaaccggtcatatagaccgaggcgtcggagagcaaaaacaccaccgcgccgttgtactcgtgggctttcgccatccgtccgatggggatacggctggtgtagtttttctggaagcgcgggtcctgatcgctgcgctcgacgccggagagggtcagagtattgacgcgaatgccgtcgcgcccccagtaggtggcgcagtagcgggtaaagttatacagcccggactttgccgccgaataggccaccggtttgacgaacggaatgccggtgtcctcttttttgtagctatagatatcctgcacaggggagaccacgccgtagatcgaaccgacgttgatgatcgagccgcctttgccggcctgtttcatgcgcttgccgacctgctgggtcatcaggaaggtgccgaccaggttcacttccaccacctcgcggaacacctcttccggaaactcttcaaacgggccggagacttccggcggcgcgctgggctgggtgtcgacgcccgcgttgttgaccaggccatccgggacgccccacttcgcttcaatgctatccagcacccggttaatgctgtctttatcggtaatattcacttccgcgcacagcaggcggtcggagtccttaatcgcccccagcacgcggtcgacgcgcgcggcatcgacgcgggtggccagcgccgccaccttcgcgccgcggtcgtgtaacgtcttcacgtactgcgcccccagctgtcccaggccgccggtcacgatgatgaccttgtctttaaccgagaataacgtgtcttccattgtcctttcccctcactgcgtggttagattttgtgggttgcgaggtaatcacgatcgagaataatgccgtggcccggcctttcgctcggcacgtagtagccgtccacctcttcgcccgcttcggcgatgatgcgcagatctttccagcgcccgccgtcggtcatctcggcgtatgagatattcggcaccgttgccagcaggctggcgctgagctccatgacaaaatgcggcgtcattggcaggttgtgcgcgcgggcgatggcggcgatatccagatagccggtgatcccgccgacgcggccgagatccgcctggatgtaatccgcgctgccgctctcgatgtactgcgtaaactggtttaagttatagacgttttctcccagcgcgataggcgtggcgctgcgttcgcgcagccgcaggtggccggcgatatcgtcggagggcagcggctcctcaatccacagcagattgagtggctcgaacagcttgaacgcgcgcagcgcctgcgggaagctccagccctggttggcgtccaccgccagcgggaagcccggcactgcttcctgaatcttacgcagccgctccacgtcctcctccagcgtcggtttgcccactttcactttcgccgccaggtagccggtgcttttccagcgtttgacctggtcaatcacttcctcaatggacagatgcaggttgatgccgctgccgtacagcggaacgcgatcgcgtacgcggccaagaatgtcgataatcggcgcattgagggttttacctaacagatcccagtaggcaatatccagcgccgccagggcatgggtggtgacgcccgcgccgccgacgtcgtgtacgtgtttatacgagcgatgccacaggccgcgcggggagagcggctggccaataacgtccgggataatctcggcaatcagcgcggagatggttttcccgcaccagccggaagtgtggctaaagccggtgccgacgtggccgttagaaccgtagacgtcaacaatcgccacttcgatatcggtgacgtggtgaatctgatccccccacgggccttccggcagcggaacgcgggcggtcatcagttcgatattttcaatcacgggcatttttgtgctgttcatctgattccttcctttatgggttcagcgggggccgcccctgcggcccgggcggttaatgtttggaggccggggattcatgcccctccagggcgattgccgggctggcgtcatgttctcgatcgttttcgtcgcccaccgcatggccgaagacttccggcagcaggaagatggaggcgaggaaggcgcagaacggcgcgatagcgataatcatcgaggcgaccggtacgccgaccgcttcaaacagggccgggaagaccagggtggtaacgaaggcggtgaccttgacgatggtgtagccgatgccggaggccaccccgcgatagcgcggttttgccaccagcgagatcaccgtcatgccgctttcggaatcccagtagtggccccacagcattagcgccgcgccgaagatgataaatgcgaagctgctgctgtagacgccccacgccgatatcgaaataccgatggtgaccagcaggaagccgtatttgctcagtcctttatgcccgagcttcggcaacagcagcgggccgacaaatgccgagagcgcggcgatacagttcaccgccagcagggcgaggttattctggatctgcccggaaatcccgatggtgacgaggatcagcggcaggaagaaggagaaggcgtagttttcaaacgactgcacggcgcaggagaaccagccgaacagggtggtgcggcgggtaaacggacgacggaacagatcgtgcagcgtctctttgagcgtcgggtcggcgatagtgacgttttcattgggcagaatgtcgtccagcagacggccatcctgttcgccgtaatattcacgggaggcttttttcgcttcgataaagcggccgcgttcgacgaaccacgctggcgtctccggcagctcccgacgcataaacagcagcaggcaggccgggatcgccgggaccgccagcacgatgcgccagatcatatccgggtgaacatcaagcgccaccagcgtggtgaccagcagaatggcggcgataatccccagcgcgaacataaactgccagcggttagccatcacttcgcgcttgcccttcggcatcacctccatgatgtaggtaaagccgttagccacgtctgcgcccaccgggatcccggcgaggcagcgaataatcgccagccagtacatattgggcgccaggccctgaagaacggcgaagatcgcgaacaggatcatcgaccagaggaaaattttacgccgtccgagcttatcggtcagccagccgccgagcagcgcgccgaccaccgcgccaagttgggtgccggcggcggtaaaaccaagcagccagctgctgggctcataaatatctttcagggcgaataaaataaacgccatggaataaatatcccatgactcaattaataatgcggtgatcattagccatcccgctttggtgcagccaggggcctcctgcagatcgagccgtttctttgccttctggataataaattcaatatgttgctgctgatacatataatcctctcttatccgggcaggcggagagcccgcccggacagatgcgcgttgatccgctctttatgggcgataaagagacgaatgaagcggatgtttgccaggatcgctaacaacgtaaaaattacataagcgaatcagttgttatttcattaataaatgcgcatcgcctgcgataaagactttcatattttgcgtcagcgcctgggcaataaaggcgttcagcacttcggataacacctcctcttctacgtaagccagactgagatggttgctctggtggcccgccattaaatcgtcgcgcgaaaccccgtcgagaacggcgttgagtaatggccactcgtagttggtcgcccggcggcggcgttcgaattcgtcttgcggcagttcgacggcggtgccggtgccgatatgcaggatcacctgggtgccttcgtaatgcgctcgcgcccagataaagcgtccggctttgccttgaccggcgatggtcgagccgccataggggaagaacatcgccggctggcgatagccggtggccccggcgatcccgcctttcagatgggcgaacggcaccgcgccggagatctccagatcccagtagaacgtgccgttgtattcgctaccccagcggatatcgtgaagggtggtttcgctcgccatgcccagcgcgccgagcagctttgccagcatcacctgcgggatggcgctgcccatatccacctcgttgatgcaggggatcggcgcgtccggacagacgatctcgccattttcatccgggatcgggaaacgttccgcgttaccgatggcgccttcggcaaaatccgaggcggcgcagctgtctttgagcccctgctgatactgcacgcccaccgccgtcaggccgaagcgcttcacgaagcgcgccatggcgatcatcatcgcgcactgttccagcacctgctcccgggtcagatccttcgccccgtcggcgccgaaccggaagcgcataccgcgggtctcataccagtcgagacaggcttcgcgcagggcggtcggcaccttgctcatttcaaccagcagcgccgattgcgacagcgactccaccggcatccctacgtcgatcatcgctttttgcgggaacacgccgttgatcatccccatacagaaggtatcgaacagcccgacaatggccttgtgtttgaggatcgactgcccaaccttcacgccaatctgcccggctttgctggccagcagcggcgcgctgggcgcgacaggatgcagatagccgagcttatggctgagatggccgtcgcgcagccaggtgtctaagccgcgaataaacgcctcgtcggcgaaggtttccgaccacagccgcgagtagttgcgctccaggctggtgaggcagcctgccatacagagcatgccgacgaggcccggccaggtaccgtcaaaattggcgagcagcaaaatagggccgcgatgatgtaccagcgaaggagcaaggtgatgggagtattgccaggcggtaagcaggacaataaccggcgcatccggatcgatcccggcgaacagctcgctaccctctttctggctgctgataaacccgtgaccgcgctgctcgttgaccggatgggcgcggcgcaggcgatagcctaatgtttccagcgccgtttccagacgctcttcaaacagcttctgcgtgggccagcaggtgacgttagccggttcgcggagatccgcattggtcaccatcaacacttcgcctggctgcggggtaataagcccggcttccgcgggtaacgttaaattcagcatgtgaatttctcctgtaggggataggtcgcttagttatcgttgagcgtgctgcgccggggtaagcgcggcatcaatcgttctgttgctggctaatttctttggctaactcgaattagcaaattaggataaaaaaagacaggaacaaactctttaccggggatttgtgatggctatcaatgtgcaattattaacttattaatatttaactgtttattttaaacggtgggtcgaggtgacagggaacgcttgctgaggcggcataaaggcgggcagaaaagcggacgggaagcgcagcggggacggtaaatcagcgttaaatatataattagttgaatttaataaattatttacgttatgccgtaagcgatttgtctcgcggcgctggcgcgagtgttaaaatttaaccgatcctggtcacactcttttagcatttacgttgtgaatctccgtatcttgttataattagctaattcgagttagcttgcgggcgattttccctcgccaccgcggttagccaggcgctgcccgacttaacaataatgattcaggacagaggatttaatgatgactatgcttacctcgcccgccatgacccctgcaaaaaatgaacaaacatcgcaacaaacgcatgaaagaagaaagctgctcaccgtgctgggctccggtctttccggcacaacgattgagttctatgacttttttatctacggcaccgccgccgcgctggtgtttccgtcgctgttttttcctaacctctcgccgctgatggcgctgctggtgtccttcctgacgctgtcgattaccttcgtcagccggcccatcggggccatcgtatttggccactatggcgataagatcggccgcaaaaaatcgctggttctgtcgctgatgattatgggtatttcgacttttttcataggcttaatccccagctacgacaccataggcaacgccgcgccgctgatacttatctttttgcgcctctgccagggctttgccatcggcggcgaatggggtggggcgacgacgctgatcaccgagtatgcgccgcgccatcgccggggctttttcggcacttttgttcagttgggcaacgtgcttggcctgtttatcgccaccggcgtttttgcgctggtggtgatgctgccggaggatgacctgatgtcctggggctggcgcgtgcctttcctgttaagcatcgcgctgctgtttgtcgggatgtttatccgctcaaggatcgaagagacgccggtgttccaggagaatcagaaacagcagcagaacgcgccgaaagcggcggagcagaagtttcccattctcaccgtactcaagcatcaccgtaaagcggtgttcctggcgatgggcatgcgcatgggggagattgttctgggctggctgacggtggcgttctttatgtcctatgtgacaagggaactcaacttcactcgcgaaacggcgctgaacgggctgctgctggccagctttgtcggcatttttacctttccgttcttcggctggctttccgataaaattggccgccgaccggtctatctggccggcgccgccatcacgctgatctttgctttcccgctattctggatgatcgattccggctcggtgaagatgtttatgttcgccaccaccttctgctattccgtggggctgggcatgatgttcagcgttcagccggccttcttttcggagctttttgacaccagcgtgcgctataccggcgtctcgctcggctttcagctggcgaacatcgtcggcggcctaacgccgatgatcggtaccttgctgctggtgtggtccggcggcgcatcgtggcccatctcgctgtttctcgcctgcatggcgctgattaccatcctgtgcgtctgcgtgacgcgggaaagctataacgatgagcttaatgaggtgaagaagtagccggggagggttgccccgccatgaccggcggggcgggcgtatcagaacagattaaatttatattcgataatcacttccgaagagagcgagttggcccggctgtaatggccgtcggtaagcaccggcgttttgccattcatcttataggaccagcccggcccgaacatcgcccagacggtgagatttttcagtcttgggtgcgtcggcacccagcggctgaaggcgttaatttccccggtacggacgtggttgccgcggtagttaaactgggcgatgttgccggcgagaccgatcgccagctccggcatcaggttatagtccgacatattagagagaaccagctcaccgtcgcgcatatagtcgttgccggcataggccattgagataaaggtcccgcgcgagtttttactcatatggcgcgggtagaagcccacttcattggccttgtttgcatcggtatagcccagaccccacttggtgctccagttgtccgcctgccacttcacatccatggcgatgtgccaggcgtcgtcgtcaaagtcacgcttattcgctggcatcgctttatactcgtccagcgcgtgagtggcgtagacctgagtaccgatgttcagcgcttttatcggcttaatattggtaaacagaatatggcggcgcagatagttatcgctttcaccatagccgtactgcatgttcaggtgctcgctttgccacagaatatcgccgctggcgatatggttaatgtactgtccgctgttggtctggaagcgtttcttatccggcgagttacgatccatcgcgctttcgatgtacgcaccgcgcagcgtgaaggggccgtagttcaccgcgccggtccagccctggtaggtggtcggagagaggcgggtggagttggagatgacgccaaagtttttcatcgtctgccagccccagcgggcgttcagatgagtgtccgccaggcgatactgtagcttgacgttgcgttgaccaaatttggaaaagccttcagcgttgctctttttattcccgctgccgttgttatacagcacgccgcgggagttaaagtaattgctggcgccgagctttaccgctccgtagtaagtggcatcaaagccaataatatcggcaaaatagccggactgataatcgacggcgacgccctgaccccaggcattatggactttctttggctcggtctcttcttccttaagatatttccagtagtttttaaacgataaattcatatgggactggctgaataacggatcgtcgagcacggtatcgatataatcgtgctccttcaggctgttagtggtcgaagctgaccaggcgctggcgggaatagccagcagcataatggcgactgttgtagtattgattttcataataaaccccagagtagggacgcagcgatccaggcgaggtgttttcgcctgaagtctgccgtaataaataattaagcgtgggtattattttttatcgagagcctgttttccggcttcgacatatttcatggtgccaatttctggaacggtatatttgccgtctttataaacaattttaaccaccgcggcattggcaagcggcttgtttttcgcgttatcgtcggttaaatcggaaatcataatctgcatggcggtaccggatgaaattgccagcacgtttttatcgccccgggcctgcgcgttttcaacgatagtgtgcagggctgcctgggtacgggtttttacctgctgatagttttccgccataccctttgggtcggccgctgccagcgcgttctggttggtatcgacggccagggtgcccgctttcatttggctgaacagcgcagcgccgtctttaagccccagctgtctggcgccggcgtcggccatatctttgttatagccaccttcgaaaccgccgaagaaggcttcccgcaggccgctgagctcagtaagtttgtaatcacttactccggcttgcttaaggatcacctgcatggtttcacgctgacgtccggcatcgctggaatagaagctatcaaacggaatacctttaagcccctcgccgagataacgagcgacgcgaatgccgtcttcggtaagcggtgagtccgcccaaccctgcacgcggtcaaacgtattcagcagcgttttgccatggcgggcgaaatagatattcacgccgtcatcgtttttaacttccgccgcagagcaggttgccgcacctgccgccatcattaatgctattagccacttcttcatataacgctccacctgaatggtctttttataagcaaaaaaaaacctacgtcagatattcgacgcgaagcataaataagattatgttcgctcgaacgtctataacgtaggtttcgcctgttctaaacagtaacaatccaacaagggcgacgttagcactaattatgagaaaagacatcctctatttattatgaatgtcaataaatgtgatcgtcttcatggaggtaattttgttgattgagttgtatcttaagtttaattttcagattaattggcagttttcggcttaaataattttagaggattgatctccgtcacagaataatgatgtccgggctggactcttttacgctctggcgttattttcgcagcactctgggattgttactgaccacaggcaaaacctaagacccctgtccgccaatttggcgtgcggcaggagtcttaggtttttttttgcgcctaagaaatacctctgctacccaacaaggagtgatgatgagaacgaaaatcctgactgccgccattctggcgttatctgccgctggcgtacaggctgctgaaaaaccgctgaaaatactgctggttaacgatgatggctgccagtctgtgggaaccacttcgctgcaggaaaaactggcggccaaagggtatgacgtctggatggtggcgccggcaacgaatcagagcggtatcgggtcggcaattacttttaagacgggtaaagtttttgatgtcaaaaaagccgctgacaaacgctactgcttccctggaactcctgccgatgcgctggattttggcctgtggggcgtgctgaaagaagcgccgccggatctggtgatttcgggcgtcaacgatggtcccaataccggtatggcgcaggttaactccggcaccgtgagcgccgcggcccgcgccgtacgctacggtttcccggcgattgccgccagcattggctaccgcttcacggaagaagagatgaagaacaaatggccgagcacgcataagtactggcctgattcggtggattatgtcgtctcgctggtggataaacttaacgctgcgcataaaccgggaagcccgattatgccgcagggggccgggttgagcattaactatccgccgctgccgtcggctgaaattaagggcgttcattatattgagaatgagcaattccctgtgccgcagattggttatgaacttctggcggacggtaccgccaaacagacgatgaatccggaggcgatgaaaccggcggaaggggataatgactcgggctggctcaataaaggatatattacttacaccctgtttgatggttcatggaacgcgccgcactaccagccgcagtttgaggcgctgctcggtaaatgatgctgtagcgatagtaaagaagaaggcgcgggttccgcgccttctttatatgaaccgatgatgaagctattcgtcgaagaaccagtagccctggttaatcaggcgggtcagatcggcaataaaagccggattgcgcagcgcggcctcgcctagctcctctttacccagcagggtatagcggcacagcgcgtccagagctgcgggatcggttggctccagctgttcgctattcacaaagaagctgtcgccgatgtgcagtacacgcaggccgctcaggcgagtcagcatttcaccgcccgccagcgcgtcgacaatctcctcttcttcaaaaggcggttcagcgggcgcaatatccagctcgtggcgcggcgtggtagcaaaacgcccaaaccagcggcggaaatcttccggctggctaatcatctcgatcatcatgccgcgcaggcgttccagttcatactcttctacccgtcccggatgttcgcggcaggtcaaatccggatcgctgtagtgctcgccgccgagatcgttttccagcgcataatcggcaaagctgctgatcaaatcgcggccgtttggcccacggaagccgacggagtagttcagcgccgtttcgtgagtgattccgtcgtgcgggaatccgggcggaatgtacagaatatcgcctggttgcagatcttcatcaatgatcggcgggaacgggtcaacgtgcagcagcgccggatgcgggcagaactgacgcatcggtagcttatcgcccacgcgccagcggcggctgcccatgccctgaataataaagacgtcgtactggtcgatatgcgggcccacgccgccgcccggtacggaaaaggagatcatcagatcgtctagacgccagtccggcagcacgcggaaggggcgcaccagttcagcggcgggcatatgccagtggtttaccgcctgagccagtagcgaccagccggtttcgcccaggccatcaaaatgttcaaacggcccgttgctggcctgccattgaccgttcttgaggctcaccagtcgactatcgacttccggttccatggccagcccggccagctcatccggcgtaatcggatcgacgaaattcgcgaaagccttctttaatacgaccggctgcttttgccagtacttttctaaaaactcgggccagttaatgttgagttgataagccataggttcataccaataagaagaaacgggcctgattatagaaatatgcaccctcaagccgctttgtcatgggtcaaggctggtgcttaattcatcatctgaagtcacgacgcggtaagagaggggaaaacgtaaagcggataacgttgattttcgcaaaatgtcacttttgcctgaattcgctgcagcccgcgtggcgtctggctttttcccattttttctggcgtggatggggcttgagaagtttaaattatgagcgtttgataagttttttgtattttaagggttgctatatcccggcagctccctataatgcgctcccactgacacggcagatgtgaatcacttcacaaacaaccgggtcggttgaagagaaaaaatcctgaaataacgggttgactctgaaagaggaaagcgtaatatacgccacctcgcaacggtgagcgaaagccgcgttgcactgctctttaacaatttatcagacaatctgtgtgggcactcaaagtgacatggattcttaacgtcgcaagacgaaaaatgaataccaagtctcaaagagtgaacacgtaattcattacgaagtttaattctacgagcatcaaacttaaattgaagagtttgatcatggctcagattgaacgctggcggcaggcctaacacatgcaagtcgaacggtagcacagagagcttgctctcgggtgacgagtggcggacgggtgagtaatgtctgggaaactgcctgatggagggggataactactggaaacggtagctaataccgcataacgtcgcaagaccaaagagggggaccttcgggcctcttgccatcagatgtgcccagatgggattagctagtaggtggggtaacggctcacctaggcgacgatccctagctggtctgagaggatgaccagccacactggaactgagacacggtccagactcctacgggaggcagcagtggggaatattgcacaatgggcgcaagcctgatgcagccatgccgcgtgtatgaagaaggccttcgggttgtaaagtactttcagcggggaggaaggtgctgaggttaataacctcagcaattgacgttacccgcagaagaagcaccggctaactccgtgccagcagccgcggtaatacggagggtgcaagcgttaatcggaattactgggcgtaaagcgcacgcaggcggtctgtcaagtcggatgtgaaatccccgggctcaacctgggaactgcattcgaaactggcaggctggagtcttgtagaggggggtagaattccaggtgtagcggtgaaatgcgtagagatctggaggaataccggtggcgaaggcggccccctggacaaagactgacgctcaggtgcgaaagcgtggggagcaaacaggattagataccctggtagtccacgctgtaaacgatgtcgacttggaggttgttcccttgaggagtggcttccggagctaacgcgttaagtcgaccgcctggggagtacggccgcaaggttaaaactcaaatgaattgacgggggcccgcacaagcggtggagcatgtggtttaattcgatgcaacgcgaagaaccttacctactcttgacatccagagaacttagcagagatgctttggtgccttcgggaactctgagacaggtgctgcatggctgtcgtcagctcgtgttgtgaaatgttgggttaagtcccgcaacgagcgcaacccttatcctttgttgccagcgattcggtcgggaactcaaaggagactgccagtgataaactggaggaaggtggggatgacgtcaagtcatcatggcccttacgagtagggctacacacgtgctacaatggcatatacaaagagaagcgacctcgcgagagcaagcggacctcataaagtatgtcgtagtccggattggagtctgcaactcgactccatgaagtcggaatcgctagtaatcgtggatcagaatgccacggtgaatacgttcccgggccttgtacacaccgcccgtcacaccatgggagtgggttgcaaaagaagtaggtagcttaaccttcgggagggcgcttaccactttgtgattcatgactggggtgaagtcgtaacaaggtaaccgtaggggaacctgcggttggatcacctccttaccttaaagaacctgcctttgtagtgctcacacagattgtctgatagatgtaaagaagcaagacggctgcgaagtcgcgacacctcgtgtccccttcgtctagcggttaggactccgccctttcacggcggcaacaggggttcgaatcccctaggggacgccacttgctggctgtgagtgaaaggcacaaccaaccgatatctcaaaactcatcttcgggtgacgtttgagatatttgctctttaaaaatctggatcaagctgaaaattgaaacgacacacagttaatgtgtgttcgagtctctcaaattttcgcgacacgatgatgttttacgaaacatcttcgggttgtgaggttaagcgactaagcgtacacggtggatgccctggcagtcagaggcgatgaaggacgtgctaatctgcgaaaagcgtcggtaaggtgatatgaaccgttacagccggcgatgtccgaatggggaaacccagtgcaattcgttgcactatcgttaactgaatacataggttaacgaggcgaaccgggggaactgaaacatctaagtaccccgaggaaaagaaatcaaccgagattcccccagtagcggcgagcgaacggggagcagcccggagtctgaatcagcttgtgtgttagtggaagcgtctggaaagtcgcagggtacagggtgatactcccgtacactaaaacacacaggttgtgaactcgaagagtagggcgggacacgtggtatcctgtctgaatatggggggaccatcctccaaggctaaatactcctgactgaccgatagtgaaccagtaccgtgagggaaaggcgaaaagaaccccggcgaggggagtgaaaaagaacctgaaaccgtgtacgtacaagcagtaggagccccaccaccaaagcgtttcgctttgcgtggtgcgcaaaatgcgtaacgacagcgcgatggacggttaacggagcgtaagcgacgttcaacatcaaaaatcaggcagtggagcgttttggggtggggtgactgcgtaccttttgtataatgggtcagcgacttatattctgtagcaaggttaaccgtataggggagccgcagggaaaccgagtcttaactgggcgttaagttgcagggtatagacccgaaacccggtgatctagccatgggcaggttgaaggttgggtaacactaactggaggaccgaaccgactaatgttgaaaaattagcggatgacttgtggctgggggtgaaaggccaatcaaaccgggagatagctggttctccccgaaagctatttaggtagcgcctcgtgaactcatcttcgggggtagagcactgtttcggctagggggtcatcccgacttaccaacccgatgcaaactacgaataccgaagaatgttatcacgggagacacacggcgggtgctaacgtccgtcgtgaagagggaaacaacccagaccgccagctaaggtcccaaagtcatggttaagtgggaaacgatgtgggaaggcccagacagccaggatgttggcttagaagcagccatcatttaaagaaagcgtaatagctcactggtcgagtcggcctgcgcggaagatgtaacggggctaaaccatgcaccgaagctgcggcagcgacactatgtgttgttgggtaggggagcgttctgtaagccgttgaaggtggcctgtgagggttgctggaggtatcagaagtgcgaatgctgacataagtaacgataatgcgggtgaaaaacccgcacgccggaagaccaagggttcctgtccaacgttaatcggggcagggtgagtcgacccctaaggcgaggccgaaaggcgtagtcgatgggaaacaggttaatattcctgtactcggtgttactgcgaaggggggacggagaaggctatgttggccgggcgacggttgtcccggtttaagcatgtaggcggatgttccaggtaaatccggagcgtcactaacgctgaggtgtgatgacgaggcactacggtgctgaagtgacaaatgccctgcttccaggaaaagcctctaagcatcaggtaacatcaaatcgtaccccaaaccgacacaggtggtcaggtagagaataccaaggcgcttgagagaactcgggtgaaggaactaggcaaaatggtgccgtaacttcgggagaaggcacgctgatggtaagtgaagtgacttgctcatgaagctgaaatcagtcgaagataccagctggctgcaactgtttattaaaaacacagcactgtgcaaacacgaaagtggacgtatacggtgtgacgcctgcccggtgccggaaggttaattgatggggttatcctcgcggagaagctcttgatcgaagccccggtaaacggcggccgtaactataacggtcctaaggtagcgaaattccttgtcgggtaagttccgacctgcacgaatggcgtaatgatggccaggctgtctccacccgagactcagtgaaattgaactcgctgtgaagatgcagtgtacccgcggcaagacggaaagaccccgtgaacctttactatagcttgacactgaacactggtccttgatgtgtaggataggtgggaggctttgaagtgcggacgccagtctgcatggagccatccttgaaataccaccctttaatggctggtgttctaacgtgggcccgtaatccgggttgcggacagtgtctggtgggtagtttgactggggcggtctcctcctaaagagtaacggaggagcacgaaggtcagctaatcctggtcggacatcaggaggttagtgcaatggcataagctggcttgactgcgagcgtgacggcgcgagcaggtgcgaaagcaggtcatagtgatccggtggttctgaatggaagggccatcgctcaacggataaaaggtactccggggataacaggctgataccgcccaagagttcatatcgacggcggtgtttggcacctcgatgtcggctcatcacatcctggggctgaagtaggtcccaagggtatggctgttcgccatttaaagtggtacgcgagctgggtttagaacgtcgtgagacagttcggtccctatctgccgtgggcgctggagaattgaggggggctgctcctagtacgagaggaccggagtggacgcatcactggtgttcgggttgtcatgccaatggcattgcccggtagctaaatgcggaagagataagtgctgaaagcatctaagcacgaaacttgccccgagatgagttctccctgaccctttaagggtcctgaaggaacgttgaagacgacgacgttgataggccgggtgtgtaagcgcagcgatgcgttgagctaaccggtactaatgaaccgtgaggcttaaccttacaacgccgaagatgttttggcggattgagaagacaacaatttcagcttagattcagagttgagtacgcaataatttgcgcagcagcaaggcgacaagcgaaggaaaggaaggagcatactgaggtatgtgactgactttacgagcgcgggcaacgcagctgatgcgataaagaattgcgtactgagcacaaagaatttgcctggcggcactagcgcggtggtcccacctgaccccatgccgaactcagaagtgaaacgccgtagcgccgatggtagtgtggggtctccccatgtgagagtagggaactgccaggcatcaaacaagtgaagagcccatcctgacggatgggctttttgcgtttttgtcgcctgagaaatcccgtgtaaaagcccggcagggatcctttaccagacctttgtcacgatagggcatccgcagcacttaagcgaaataggtatatatcgctttgaaataaaaggtttttttaactttacctggcgtcacaacgagaacgatgaatcgtgcggagagcttgccggcaaaaccactgaaagccgtgacggcgaatagcatagatctatttaaacccaattatttatcgaaaactcatctacaaagaatttattttgtgaataaaataattagcatgaacgttatatgaaaataaaaatagagataaacgcgtttctgaatatttaacaggaattatattaagaatattacccgcataacgcttaagttattctaaagtcatcaggttaacaaatagatacgaaaccctctcccctgccgagcacacaggcataacagctggactttttctgcgaaatgacttagtgtccttaacactttgttaactcgatctggtttaagttaattcaaatttgctaaaaacatagggtgcattgcctgtatggaagctaacccggtaacgtcttttgacgaatagtgcatgttaccggctggcaatatgagaatataaatgaaatttctgattaactggcctcctttgcgccaactgatacattatatccgggagcgttttacctttctggtcctgctctgctggccggcgatcatctggctggtttgccgggcgcttgtctggttaacggatggattgatggctcttctgggtaaacccaccgaccactcgtttaccgtgtatcttcagccgcttatgacgctaagtgcgctgctgagaatttccgtcagctgggtgctgctgctgtttatcctgttcagcatggcgatgggattcacctgggctctgcggcgctttatgaatcgccataaatagcgccgatgccgcgaccggcagagcgacatcggtattgcttcaggccatttccccgatcgtcttacgaaaacgcagtagggcgatagtaaaaaacacgccaccgatagccagcagcgtcagaaactgcggccagacgatagagaaatcagcgcctcgataaagaatggcctgcgccaggctgacaaagtgggtcgtcggcatggtgagcataatatcctgtacagcctgcggcatactttcccggggcgtggagccgccggaaagcatctgcagcggcaaaagcaccagaatcatcagcagccccagctgcggcatggaacgcgccaccgtgcccataaaaatgccgattgaggtagtggcaaacaggctcagggccactccaagcataaagagcggtatcgagccttctatcggtacctgcagcacgccctgaaccatcaggatcagggagagtccggaaaccaccagcaccaccagccccattgaccatatcttcgccatcatgatttcaaacggcgtgaccggcataaccagcaggtgctccacggtaccatgctcccgctcgcgtatcagcgccgagccggtcagcacgatcgccagcatggtgatattgttgataattgccatgacggcgccgaaacgctcctgctccaggttcgggttaaaacgcatcctgacggccagctcaaccggcagcgtaccgttgtcccggtagcgggcgacaaagctgttcacctcgccggtgacgatattctggatatagctattgccggtaaacgcctggctcattcgcgtcgcgtcgacgttaacctgtagcgcgggctggcgtccggccagaacatcgcgctggaaatccggcggaatattgatggcgaaagtatagcgccccgcatccagtccggcgtccatctcatcagctgtaatcagctccggcggcaaaaaccagggccggtaaaaaccattgataatacgcgatgaaagctgcgacttatccatgtcggcaatagcgatgggcgccagatgcagcgaacccggcataacggtcgcggaggagtaaaccgagacggtaaaagcaaagacaatcaacgtcagcatcgctttatcgcccagcaggctgcgtagctctttcatccccaaattataaatattgcgtaatccgcgcattatccctcctgttttttcaacagccacacgctcaggcccagcaccagcggaaccgcgataagcagcggaataaaggatccccacaggtcggtcagattcagcgctttggaaaacgttcctcgcgcgatggtcagaaagtggctggttggataaatctggccaatccagcgcccggggccttccagcgaggcgacggggtcgatcatcccggaaaactgcgtcgccgggataagcgtaatgatcgcggtgccgaaaatcgccgcaatctggcttttcataaaggttgaaatcagcaggccaagtccggtggcgatagtgacgtagagcagcgcggcgagggtgagcgtcagaaaactccctttgtgcggtacgccaaaaacaaaaaccgacagcgcgcagagcaggaagaagttgaacatccccagcacgatatacggcacctgtttacccagcagaaattcgctgcgggtggttggcgtcacgtacagattgatgattgaaccaagctctttctcgcggaccacgctgagcgcgctgagcatcgccgggatcatcattaacagcagcggaatcaccgccggtacaatcgccggcaggctcttcacatccgggttatagcgatagcgggtctcgatggaaatcagtgaggtatcgcgattggggctggcctggcgaccggccatctcctgcagccaggccagatgcatggcctgcacgtagccgcgcaccgtctccgcgcggttcggcatcgcaccgtccacccacacgccaatctgcaccggcgttccccgggcgatatcgcggccaaaattaggcggaatttcaatcgctaccgccagctcgccgttgcgcattcttctgtccagttcgctatagctttgcagcggtggctgttcgatgaagtagcgtgagccggcgatattttgcgaccagccctggctactgacggtctggtcgcggtcgagcaccgcaaaccgcagatcttcgacgtccatactgatcccatagcccataataaacatcaggatcacggtgccgagcagtgccagggtcgatcgcaccggatcgcggcgcaactcaagcgcttcgcggcggctgtagctaaacaggcgctgcaggctgaacgcctgacgcggcgccacgctttcggctttatgttccatcgcgggaatcggtgcagcctgcgcatcaggcggctgcgcggcatccgccgcttcctgtagccaggcgataaacgcctcttcaaggctggccgatccgcgctgctccaccagcgcctgcggcgtatcgctggccagcacttttccggcatgcatcagcgaaatgcgatcgcagcgttccgcttcattcataaagtgggtggagataaaaatggtcacccggtcctgacgcgcaagatcgaccatcagctgccagaacatgtcccgggctaccggatcgacgccggaagtgggttcatcaaggattaacatttccgggcggtggatcaccgcgaccgccagcgagaggcgctggcggatacctggcggcagcgaagcgggcagggtgtcctcaacctcttccagcataaagcgctggctcatttcggcgatccgccccgggatctccgcatcagggatgtggaacaggcgggcatgcagctcgaggttttgccgtacggtcagttcgctatagagggagaaggcctgcgacatatagccaacgcggcggcgggtttcgatatccctggggtcgaccggctggccaaacagccacgcctcgccttcgctggccggtagcagcccggtcagcattttcatggtcgttgatttgccgcagccgtttgagccgaggaagccgaaaatctcgccgcgggcaatgcgaaagttgacgtggtcaacggcgacaaattgaccgaagcgcatcgttagcccgcgcgcttcaatcgcaacttcgctttcgtcagcattgcgcggcgggatgatcacctctttatgcgccaggcgctgggcttcgggaagcagggcgataaaggcctgttccagcgtctgactcgccgtgtgcgctttaagctcatcggcgctgccggtcgccagaacttcccccgcgttcatggccaccagccagtcaaagcgctccgcctcctccatgtaagcggtggcgaccaggacgctcatctccggctgacgctggcggatgctgtcgatcagatcccaaaactgcgcccgcgagagaggatcgacgccggtggtgggttcatcgaggatcagcagctgcgggtcgtgaatgagcgcgcagcacaggccgagcttttgcttcatccccccggagagttttcctgccgggcggtcgcgaaacggcgccaggccggtactctggagcagctcattgatgcggatgtcgcgttcggctttatcatggccgaacagacgggcgaagaaatcgacgttttcatagaccgacagggtatggtagaggttcttccccagcccctggggcatccaggcgattttcgggcagacgtcctggcgatgacgtacctcgctcatatcgccgccgagcaccataatgttgccgtgctcaatcacgcgcgcgccggagatcagcgatagcaggctggacttgcccacgccgtcgggcccgatcaggcccaccatacggcgagcgggaatgctcagcgtaatgtccttcagcgcgacggttgcgccaaagtgctggctgacgttttccaggcgggcgacggttttcattgcggcaacctcaccgtcagcgcttcaggccacgcctgctggttatccaggcggacccaggccatcccgggcaggccggtcttcacatactccagatgctccgccagcagctctggcggaatacgggcttttacgcggaacatcagctttagccgttcatcgctggtttccaccgttttaggcgtaaactgcgccacgctggcgacaaaactgatattggcggggatcaccagattctgcgcggcatcgaggataattcgcgcttcgctgcccagcgccagcagacccgcctgctcggtaggcaggaagaaggtcatatagacatcggataaatcgaccatattcagcacccggccgcccgccgccagcacctctcccggttcggctacgcggtactgaatgcggccatcgcgcggggctttcagctcgctatcgtcgatatcggcgataatccgccgttcggtcgcctgggcggcctcgacccgggtttgcgcctgaatgatgctggtgcgcgccgcctcaatcgcggccctggcggcagagacctgcgctttggcggattccagcgccgccctggcgctttctgccgccgcctggtcgtcatccagctgctgcgcggagaccgcgccgcgctgcgagagcgtgctggagcggacgtgacgtttagccgaggagttcagctccgcctgccgctgcttcaccaccgcttccgtagcgcgcatttcgctttggcgctggtcgagcagggctttcgcggcggcaatcgcgctctctgcttccttgatttgcgcggcggcctccagccgttgttcgttgagtacccgggtgtccatacgggccagcacgtcgccctggcgaacaaactgcccctctttgaccaggatggtgtcgatacgcccggcggttttggtggcgatatcgacttcagtggcttcaatcctgccgttactgctggcaaatcctgccggaacccccggcgggcgcagcatccaccatgccgctgcggcaatcaccaccgctaaaccaataacgtatccaacccaacgccgtttgattttgtccatacgcgactcgctttgttccataggctgagtggtgcgcgcttctcctccgcatggcggagtttcgtctcttcagggaagggagaaatcggggataaggccgaccggcgcagggagcctgcagcgctgctaaccggtcagaaagaggtgcgatcaatgtggtcatcatcagcaatcctcgccttaaatgaaacacgcatatttattgctaccgtcaatgtcatactaacacccgcaatgagtatgtccatatacaaagcagggtcttgtcgtcgggttaacataaaaacagcgaggagcgcgatggcacaatattacccataatgcctattggggtgataccggagcagataatcttaatcgttcttcattaaatcatcgtacatataagctattccttagcgctaataaccagaggatattattccctggcgactggcgcatttttaatctggttgccccaggagaactgttgtatgatcggcggccctgaaaatacactcacgccgggcgagcgctttattcaatgaaagatgaaagccaaaaatatatctcgattatttttaaggagtggttgccgctgtacgacagcctgacgccggaagtgagggcggtacttaaaaatattgccgggcagcaggcggaggcgttagcgacccgtttttatgattttattttccaggacccggacattgcgcggcaccttagctatgacttagttcaggagcggctcagcagctcgctggccgggtgggtgaaagatatcctgatgtgcgataaggaaaatctgcaggcgctggcggagcggcagtacctgatcggcagcatccattcacgcattggtattccggcagaggcggtactgcgcggcgcgcgccagctgaaagccgggctgattgaaaatatccgcgatagtcagctcgatcgcgagaccagcgttgccgccatctactacgccatcatggccattaacatggcggtagaaatgatgtgccacgcctataccctgtcgcactatcgggcaacgaaaaatgaagaagcgtaccgcctgtatagcctgatggataacgtgccgctggaatatggcaaacagcaggcctcgctctccggatgggaaaataccgctatttttaatatcgttagcgataataaaagcgatattaacggagcgttattatctgattctgaatttggcctgtggttccgccataaatgcgtgcgttattttaacaaaaatccgcaaatgcaggaaatcgccgacttaattagcaaggtggatgcgctgttatccgcctggaaatcctcgtctgagggttctgagtataaaaacacgcaggctttgctgcaggggatccatatccattgccagcagatcggcagccagatgggggtgctgtttagcagcctgtcgcagatgcaaagcggtaaggatacgctgaccagcctgcttaaccgccgctatctgccggttgtcctcaagcatgaagtgacgctggcgatggaatatgaactgccgatgacggtggcgattatcgacatcgaccactttaaagagatcaatgatagctgggggcacatggtcggcgaccgggcgattaagcacgttgcggagctgctcagcgataatattcgatccagcgattatatcttccgctacggcggcgaggagtttctgctggtgctggtggagaccggcgccgcggaagcctttactatcctcgaacggctgcgtaaaaaaatcagccagctggcgtttagcgttggcgctgacaatgagatttcgattaccgccagcatcggctacgccgtccacaccggtcatccggattacaatctgctgctgcgcgatgccgacagcgcgctgtacgtcgccaagcgcgatgggcgcaactgcgtgaagctgcatgaaggcgacggcaactaagctgccgggtccttcccggaggcggcgcgctgcgcctgtccgggctaccggatcgcagacggctgtgaacccgtagccccggtaaggcgacagccgccaccggggaataaaccgcagaatatcttccggtcgggcgccatcccggaggcggcgcgcagcgcctgtccgggctaccggatcgcagacggcagtaaacccgtagccccggtaaggcgacagccgccaccggggaataaaccgcagaatatcttccggtcgggcgccatcccgggggcggcgcgctgagcctgtcccgcctacctgaccgcagacggctgtgaacctgtagcccgggcaaggcgcctcaggcgccgcccccgggagagatgtggcagcggatttcagtgcggagagatcgccgcgcctcaaaacagcaccggcagccccaggccgcgttttacttcatgcagcgtccgttgcgtcagttcgtgcgcccgttcgcttccccggcgcagcagcgccagcagcatgcctttatcctgaatataggtcgcccggcgttcgcgtatcggcgccagcagctcctgtaagcaggtctccagcgcgtttttgcactgcctgtctcccagccctccgcgccgatagtgggctttcatctcggcaacgaaggtcttatcagcatgaaaggcgtcgagataagtaaagaccacgttgccttctgtctgacccgggtcggcgacccgtaggtgattcgggtcggtatacatggcgctgaccgcacgatggatctcctcttcgctggccgaaagggtgagcgtgttccccagcgatttcgacattttggcgttgccatcaatgcccggcaggcggctgacgtcgctgagcagcgctttgcagtgccgtaagatcggcgtcgtcgtcaggctattcattttgtgcacgatctcattggtctgttcaatcatcggtagctgatcgtcgccgaccggcaccagttcggccttaaaggcggtaatatcggcggcctggcttatgggataggctaaaaatcccaccggcagcgagcgggaaaatcccttctgggcgatttcatttttcaccgtcggattgcgttcaacccgggcgacggtgacgatattcatatacagcgcgctgagttcggccagcgccggcagggcggattgcaggcaaatggtggtcttctgcggatcgatgccgacggcgagataatcggccatcacctcaaggatattgctgctgattttttgcgggttgctgccgttgtcggtcagtccctggagatccgcgacgaggataaactgctggtggtcgtgctggagcagcacgcgctggcgcagggaaccgacgtagtggccgaggtgcagctggccggtaggacggtcgccggtcaggatcgtttggctggtgttcataagtgactccttaggatgctatcaggccgaagggcgacactcagaaacaacaaagccgccttccggcggctttgaatagaggaaacgtcaaatcttgccgcctgttatgcaggcagccaccaacggcggaggtgagagatgacaacgtttctgttcatctttttatcctgccacgaaaagccgcggcagtaaaagcccttttttattcagcgataaactggcagcaggttaaagctggataaaatatgaattattgcgttggcgccgccgaagcacaaaatcaggataatcatggcattgccaccccagacccgatagttcgggctgccgaaacgcctgcgcgaggcgcgcgccagcagggcggggacgatagcggcccagacggtggcggcgagaccggcgaaaccaatggcgtagataaaaccgtcaggccacagcagcccgccggcgatcggcggcagaaaggtcaccagcgcggttttaaaccgccccagccggctatcgtcaaacttaaacagatccgccagataatcaaacaggccaagagtcacgcccaggaacgagctggcgacggcgaagttggaaaagaccgtcagcagtaagtccagggtcgaactgttcagcaggccgcttaaggtctgcaccagcacgtcgatgttgccgcctttttcggcgatagcgataaacgccgggcgcggaatattgcccattgtgccgaccagccagatgatatacagcaccagcgccatcagcgtgccgagcagcaggcagcggcgaatgataagcgggtctttaccgtagtacttcatcaggctggggacgttgccgtgatagccaaaggaggccaggcagaacggcagcgtcatcaggacgtaggggagataggacgcattgacctccgcgcggttaaacagaatcgcgggctccacgtgccacatcagaccgccgaaggtcataaagaaggtgaggattttggcacccagcacgatagtcgtcatccggcttaccgctttcgtacttagccagacgataaaggcgaccaccagcgcgaacgccagcccgcccaggcgtgcgggaaccgcgaggttcatctgcgcaaaagtatgctgaataactgaaccgctggcggaaatataggcgtaggtcaggatatataaaacaaaggcgacggtcaggccgttaataatattccagccgtttcccagtaaatcctttgtaatcgtgtcgaagctggcgccaatatgataattgagattggcttcgaggatcattaacccggaatgcagcatgcaaaaccaggtaaaaatgagcgccagcagcgaccagaaaaaccaggcgccggacatcaccaccggtaaagaaaacatgcctgcgccaataatcgtgccgccgataatcatcgctccgccaatcagcgatggcgtattagttgagaccgcttttgagactgatagtgtagccataaggtgcattcctcacgtggctatatattaaataaggggctgcgggaaaacggctacccggcgcaacccgaataattgagcttaaagagatggaattaaattaatggcgctcttattgcgagagcgccgtgatgcggtttatttcaccggtttcagtctggcgacgaagtggcgcagtaccggcggttcgtaggtgaaggtcaggcccttaatcgtggcggcgcgcgccttaacggcgatcagcgcatcagcgatatagtccatatgatcgttggtataaacccgacgcggaatggtcaggcgcagcagctccatcggcgacgccttctgtttgccggtttccgggtcgcggcccagcagcagggagccgatttccacgctgcggattcccgcttccagatacagctcattgtttagcgcgtgcgccgggaactgctccggtgggatatgcggcagcagcagcttagcatcgacgaacaccgcatggccgccggtcggatactgaatcggaatgccgccttcgcgcaggcgttcaccgaggtattccacctgattgatgcgataagcgaggtaatcctcgttggtcccttcttccaggccgatagccagcgcctccatatcgcgtcccgccaggccgccgtaggtgacaaagccctccatcggcacgcagcggatgcgcacttcgttgaacagatcttcgtcatcgcggaagcagcacaggccgccgatattcaccatcgggtctttcttggcggacatggtcagcatatcgccgtactggtacatctcgagaataatctctttcaccgatttatcggcatagccctcttcgcgctgtttaataaaccaggcgttttcgcagaagcgggcggagtcgattaccaccggaatattgttctggcgcgcaatctgatacacctcgcgcatattcgccagcgataccggctggccgccggagctgttacaggtgacggtagtaataatcgccgccacgttttccgcgccgtgctcggcgatggtcgctttcagcaaatcaatatcaaagttgcctttccagtcgtaccacgaggtcgtgtcgaaggctttcggcgtcaccacgttaatggcttttgcgccgttcagctccacgtgcgcggcggtggtatcgaagtggaagttggaaataaacaccggatgcgccgacttgcggcgagcaatcaggctcgggaacagaatctgctccgcgccgcgcccctgatgggtgggaatggtatacggatagccgataatctctttgaccttttcgcacagatgctgatagttacgcgacccggcgtaggcttcgtcgcccatcatcagcccggcccactgatggtcgctcatcgcgccggtgccggagtcggtcagcaggtcgatatacacgtcctggctattgagcaaaaacgggttatagcccgcctcttccagcgctttgacgcgatcgtcaaaggtagtcatacgaatgttttcgaccattttaatacggaacggctcagggatacgtttcatttattttctccatggggatgctgtgccgcgtttggctatttggcgacaaataaaaagcgcaacaaatagcgactaaacgcagtgctgaattaattttttttagggagtaaacagcagcggagaattaacgagggaagtcgttggagatgcggtgatctaaattataccagtcgtccaggccgccctgggcaatgaggcgataaatcgatttttgcgtcatgacatcgtcctctgtgggtgaagggatgccataaaaataaggtaaaatgagaaaataaccacgattaaaatcacaaaaaataatttatcgataagcggagtataaaaatttgacgctcgtcgtctttttagcgttattgattagcaggcaatggttttttgttttttattacgccaataacggcttattgagtgaggttattagcgccttcaccgcaatcaatgaaggcgcaggcgggacttacatgctggagaagacgttcataatgatgccgcccgagatgatcagcaccatggcgagaatagccgggatatccggtttttgcttataaaggatcattgagcaaatcgtgacgccgacgatgccaaaaccgcaccacagcgagtaggcgacgccgaccggaatggtgctcatcgcgcgggtgagggcgaagtagcacaggccgtaggcgcataccaccagcaccgacggcgccagcttgctgaagccgttggtctttttgatcatcgacgtgccggtgatttcggagccgatagacagcgccagccataaaaatccgaggttaaacataagcggttccttttctgttagttggcgacttttttgtccagagatgcagcggccggctgcgcgggtgcttcctcgctctcttcgctacccattttggaaaaaaggttcatgatcacgatcccgctggcgataaccgccataccgataatggcggcggtgtccgggtgctggccgtaaaacgccattcccagcgtcgataccacgagaatgccggtaccggaccaggtggcgtaggccaggccgacgggaatatccttcaccgcgcgggatagcgagtagtagcaggtgcagtacagcagcaccagcagcccgagcagcagcattttgctcatcccttcactgctgccgaacattttgagggtggaggtagctgaggtttcggaaacgataaccagcagcatccatagccaacactttgtttttgaagacataagttaaactccgggtttactatttaaggtaaggttctttttttctgttttttaaaaaatcgatagcggcatcggtcaactgcgcttcaggggcacaggccagcgccggattattcactacgtctgtgacagtgagataacgccgcggaccgctcgccgacggcgccgtcgctccgcgacccgacgccagcttctccagcaattcgttcatggtgcacagcgcgatgccgcattcggccaggcgggccagcgtggcctgcatatgcccggcgtaagcggtatcaggctgcgccccgcgcagctggttaagctcgctggcgggatcgcagtgatagcgcagcgccagcaccggcaggccgctcagcagggcatcgtgcacgcggcgggtaaccggaccgtgcagggaacccttcaccagatccgccgccagcgggtagtcgagaaacggcagcagcagcgccttatacgaggccgaaggcagcccctgttgccagtcggccgccggcagcgttttaccgatagcccgccactgctctccgtcgtcaatcccgctatccagcgccaggtgcaggctctcgccgcagccggccagccgctggcgaatagcgtgccggtagcccgccgcggcggtcaccatcaccagtaccggcggccgcagacgctggataatgcgttcaaccaggtcttccatctgttggtcggtcatggcgagcctccgttagccgatgagcgtgacctgcgcgccgtttttcaagccggcggcgttggcctcttcggtatcaatatgaaactccagcgcaaagtcttcgcgtacccgcaccaccacttcatcaaaggtcagctggcgttcgccatcgctgcggacgctaaccttctggccgttggcgacgttcagctggcgggcgtcctgcggcgacatatggatatgccgccaggcgcagatcacctgcgatcgcagctcaacgtggcctgccgggccgatcagcagcgcgctgcccgcgttctccagctggccggattcgcgaaccggcgctttgatgccgagggtaaagcagtcggcgcgggagatttccagctgcgataccgggcgggttgggccgaggacgcgaacgttactgagtgagcccttcggaccgaccacggtgacgcactcctgggccgcgaactgccccggctggcgcagcggcttaaacggcgtcaggacgtagcccttgccaaacagcgcttcgacgtcctgctgcgccagatggacgtggcggttagagataccgaccgggatagccggagcagcgtggctcaggcgggcggcgattttttcatggagcagggtgtcgatcatgccttcttccctttcctcatcgccgcgtttttatcttccgtcggcgcaggcgcggcggcgggttcagtgggttcccttgtttccgcagcggcgggcgcgacggcttcagcctcaagcggcgcggcagcttccgcgcgcggcggacggcctttcagggtgctgagggcgtccacgacgctgcgctccggacgggcgatcgtcagggatttaacctgcgggtcgatgagcgcggcgacggacacgccgcgttcgatagcggtgtgaatcgcgctgatctccccttcaaagcagacgctcaccagccccgaaccgactttgcggtagccaatgcaggacacgcctgcgcttttgcaggcggcatccacggcctgaacggcggcaactaaccctcgcgtttcaattacgcctaaacttttcattgtcggctcctgttaatggcggactaagcgaatatcaaaatcaaactgcgtgaagaacgtttccagccggtctaactcctcggcggaataagttgggtctcgggtaatggggtaaggcatatcgaggcgctcatattttttgcgcccgagctggtggtacggcagcatatcgatgcggcggatatttccgcgcttcgccagcttttgtacgtaatcaatggctccggtaatggcatcgaacgagtcgttatagccgcgaaccagcggcatgcggataatgacgttagcgccggagtccaccagccactccaggttgcggcgaatgccttcgttaccgatgccaaataacgctttatggtgctcgctgttaatttgcttaatatcgaataagaaggtgtcggtcaccggcgccagcttttgataattggccagcggcgtggtgccctgcgtttccacggcggtattgagcatcatctttttgcattcgctaaagagcgcgacggcaaaatcggtctgcaggctcatttccccgccgccgatggtgacgccgccgccggaggagatataaaagtcgtagtcctgcatgatgatctccatcagttcgctgacggtgacatctttgcccataatatccagcgcgttctgggtgcagatctcttcgcacttgcggcagccgatacagtctttattacggttgacgaaatgcttcatttcgccgttttcttccgcccgataatgaattcccgccgggcagacgttgacgcagtcgccgcagttaatgcatttatcctgtgagaacatcacctgaaactggctattcagcccttccgggttagcgcaccacgggcagcgaatattgcagcctttgaaaaaaaccagcgtgcggatcccatcgccgtcatagatcgaatatttctgaatattgaatattcgcccggttaattcttgttttgcgctcacacatacctccagaaaaacgatcgggacatccgtgtccaaaaacgtccgtgtctttatcagaacttctcgatgaccgtacggctgataatctcgtcctgaacttctttacacagctcaacgaagtaggcgctgtagcccgcgacgcggacgatcaggtcgcggtatttttccggctcctgctgggcttttttcagcacttcgttatcgacatagctgaactgcatctggccgttgccgagaatcgacgcggtgcgcagcagggtaatcaggccgtgacgaccttccggggtatccagcagccctttgaggaacttgaagttgtgcaccatgccgatgttcatggtttcgacgttcatcttgctcaccgacttgatgatcgccgtcggaccctgcttatccgcgccctgagtcgggctgatgccgtcggagagcggcatccacgccaggcgaccgttcggcgtggcgttggtcagctcgccgatcggcgtgttgttggagatggacagggtgccgtggctcagggtggagtagagcatcttgtacttacggcactcgcgctcggtccactcggtgatatccagcgcataccgatcgacgtagttatcgtcgttgccgtatttcggcgcgttgaggcagtcgcggcgcaggccttcaaagccttcgaagttcgccagcagcgcgtcgcgcacctgctcgagggtgtatttcttctcttcaaacaccagcttacgaatcgccgccatggagtcgacgtaggtcgccagaccggagaagatcagccccgggccgtggttgatcatcgcgccgccggcggcaacgtctttgcctttttccatgcagccttccaccagcagcgacatcagcggcttcggcgccacgtcgcggtgcacgcgctggctgatgaccgtcccgatcgccgacaggcgtacgatatgggcgatctgttttttcaccgccgcgtcgaaatcctcgaaggtgtgcaggtcgcgcaggtcgccggtatccagcccctgatagctgtcaaacagcaccatccggccgcggtttaaaacgaactcaatggcgatgggccactgggtgtagccggtggaggtccactgatagatgcggccggatttctgcggctcgacgcagcccatcagacagtagtcgcgggcgtcttcgaaatcgaagcctttacgcagcatcattttgatatgggagtcgtcgaagtggcaggccgggaagcccatccccgctttgacgacgtcgacgattttttccatatacttctgcggcgactggttgtgaatacggcaggccagcgacggctggtaaaccttcacgaagcgcacggcgtccatgatcaggtaggtcaggtcgttacaggcatcgccgccggagcgcttctgaccgccgacggtcaggttgataaacggctgatagccggcgaaatatttcgcccccagctcgctggacatccacatcagctcggcgcatttgatgataaacgcctgcagcagctccagcgcggtgtcgtgagtcaggcggccttcgcggatatcggcttcaaacatcgggtagcagtactggtctacgcgtcccagggacagtccggtctggttctcttcaatttcaaacagcgactctacggtccagatgctctgcagcgcttcctgcagggttttcggcggattcgccggcacgttctggttcacctcggcgatggtcagcagctcggcgcgacgctgggcgttctgctcaatcgcggccagttcgcgggcgcgggcggcgatgcggtgcgcgtagttaatcaccccttcgcaggtttcaatggccgctttgtagtagtagatgcggtcgatatcttccgggttttccatgctcaggctggcgagatgcgcctcggcgtcggctttaatgccgttcatccctttggtaaacagcagcacatcgtagcccgggcaggtgtcgccgccgccgttgatctggtggtaggagaggtcgctgacgaaggtctcgccgctgaacgcccatacgcccgcttcgcggtactgggcttcgcagatttcatccagcgagcggccttcccagaacggcacgatctcttcgcggatggtttttttatctgcttcgctgatctcaaacggatcctgcggacgggtgctcatggtatcgagttcgtcgcgcacccagcgccaggcgatatccggcgagaaggcgcccgcgcgcggcttgccgcacggatgaccgacgatcagctcatcgtcctgaatcagaatcggcgcggtttcgcaggcgtgacggaaggctttggcgcgcagcagaatcgtcggcatgccggggttggctttgaccacttcggtaaaggccagcgcgcggtagatagagacgctcgggcgcacggtcaggtagtggttacgcaggcgctgcatgcgcggggtcagcccttctgctgccggcgtctcgccggcggcggcaaacggggcggcggaaacgtgctggacgcccttgaacaaacgcaccggcagatgcagggcgctcaggttgtgctgcgcgctgaggaacatgtcggagagttcgttaatgcgcgcgttctcaaggcttgcgccgtggagcagggcgtcgaacatcggataaccgtcgatcgcgcaggcggcgcgcacttcgcacagctccgccagcttgaaccacagcgattcgacgatttcatacgcctgctgcggggagagcgcgccgttgttgatatcgtgctggtagtaaggcaacagggctttgtcggcgccttccgggttgacggcgtagctgccgttatcgagctggagcgccagctggaacagataaaaggcctggcacgcctctttgaagctgcgcgccgggtgagccggaacgtggtgcagaatggcggcgctgtccagcagttccgcccggcggtaagcgttggtttccgcggcggccagctgttccgcgctgttggccaggttttgcgccagcgccagcagggcatcgcaggcgtagatggccgcgcggcagccgttgacttcatccatgccgctgcggctgacggcgctgcccagcgcgcgggttttctcttccagctgatgttttatcgccagcacgcctttttccatcaccagcttgtaatccggggagtcgagatcgctattcaggttgaggaactggaacgcggacgggcgacggacggcgctctcgtcgtggaaaatcgccccgtgcggtttgcgggtctggttgccgacgatcagctcgtcggcgctgatgcacagcggcagctggcgcatcagttcatagaagcggcgcgccggtttgacggcggcgggaaccccggcgatatcgccatcaagggcgttgagcgtggtggcatgttcggtgcacagggtgcttttttgtgagagtaaacgttctgccaacactttgacgcgcggcgttaagctgtagtgtgccataggtaaggttctccaaatcttgttatcagtggccctgaacggcgttgccggtccatgcccggcgatagagttcggtcagtgcgtgagcgtccggcgcgcgtgggttcgtcggggtacagctgtcgcgtagcgcctggccgaccatctccgccagccgctgttcaaattcggcggcaatgacgccggtatcacgaatgccgcccggcatgctcatttcgtcttttagcgcctgaatggcgaccagcaggctggcgacgccctggcgggtagtggccgcgggcagatccagcagatgggctaatcgggcgtatttgcgggcggcatcggtatcgcactgcccgtgataatcggcgttccaggccaccacgtccgccatcagcagggcgttagcgcggccgtgggggacgcgaaacacgccgccgagcgcgtgggcaaggctgtgggtgatgcccagcgaggcgttggtgaaagccatgcccgccatgcaggaggcgttgtgcatcttttcccgcgccagcaggtcgccaccgttgcgccagcaggtcggcagaaaacgaaatacctgctgcaccactttctccgccagcgcatcggaaaagtcgctggcggcgagggagacataggcttccagcgcgtgacacagcacgtccatcccggtatcggcggtgatcgccggcggcaccgaggccaccagcgccgggtcaagaatggcgatatccggcagcagcgacgggtccaccagcaccagcttctcggcgtgggctttcaccacagaaaaggcggtgacctcagagccggtgccgctggtggtggggatcgccacaaagcagggcggctcgcggtgagcgttcggacgggtttgcgccagggcgaaaataaccgctttggctgcatcaatcaccgaaccgccgcccagcgcgataaccagatccggatagctgttatccatccgcttcataccgcgcactacggtggcgatatccgggtcggccaccacgtcgtcccagacctggtaagcgatgccgcgcgcattgaggatctgcgtgacgcgatcggcgaggccaaacttaaccatcgcctggtcagtgaccagcagtacgttgcgggcgggcagctcgttcaggatggcaagcgcatcctgaccaaagcgaatccggggtttcagcaaaaattcactcattgggttattgactccttaagcgtcccgaaacacgttctcgacaatggcgaccaccgacatggccttgtagcgctctttgttgagcgccaggtactcttcggccagcacgatgtcgtgcataccggcgccgacgctatcaacggcaacccaggtctggtctttcatcggctgctggtcatcatctaatttgacgatcagcagcaggttgctgccccgtagctcatcgcacttctgcgtggcgacgacatgtccgactacctttgcgagaatcattgttttttatcgccttatatcaatgtgttacttaccaaggcgttccagcacctggcggatgacgcgttccacgttttgctcattaatctcgctgtccgcgccgacggcggcggcagacgcaaagcgatcgtcggcgctggccgggtgggctgcggtggcagcggtcgccggggcgttaaagcgctcatcgtcgaagatgctgcggttcgggccggccgccgggctgacgatggtcggctgcggttccgggcggctgcccggcgcgcgcagctcatcgatggagcgcacgccgtagcccactttgcggatgttgagcaggttcatcggcccgacgttgtctgagctggagccgccgccgaccgcgccgcagccgagggtcagggccggggtgatattggtggtcgcgccgatgccgcccagcgccgccggggtgttgatcagaatgcggttaaccggtttttccaggcagaactggcggatgacgtcctggttgcgggtgtggatcaccagcgtgtggccgaggccttcgttggtcagcagctccacgacgcggtggcaggcggctttccagtcctcttcgacgtacaggccgagtaccgggcacagtttttcccgcgagtaggggttggaatgcgataccgtggcctgctcggcaatcagcacccgggtgctggccgggacgcagaagccggccatctggctcagatagagcgcggttttaccgaccactttagggttgatggtgccgttggggcgcagcagcagggccgccatttttgccgcttcgctttcgttcatgaagtacgcgccctgggcttccagttcgcggtggacttcgtcgtagatacagcgttcgacgataatcgactgctcggaggcgcagatcacgccgttatcgaaggttttactggtgatgatatctttcaccgcgtgggggatatcggcgctgcgttcgataaacgccgggccgttacccgggccgccgctaatggtcggcgtgccggacgcgtaggcggcgcgcaccatgccttcgccgccggtcgccaggatcagcgacacgtctttgctgtgcatcagctctgaggtggcttcgagggtcagctggctaatggcgtcgacgctaccggcaggtgcccctgccgcttccgccgcgcgcttcacgatttcaatcgctttccagctgcactggcgggcgccgggatgcggggagaagataatcgcgttgccggccttcagggcaatcagcgttttgtagatgacggtggaggtcgggttggtcgatggcaccagcgcacaaatcacccccagcggcacgcccacgtccatcactttttgtagcggatcgtcatgaatgatgccgacggtcttcatatctttgatggcgtcgtagacgcgcagcgaggcgaagcggttcttcagcactttgtcctgccagttgccaaaaccggtttcttccgcggccattttcgccagcgcttcggcatgatgcgccgcttcctgggccacgttcttcacgatggcgtcgatttgctgctgcgaaaaggtggccagaatcgcctgcgcctttttggcattgcgcaccagctcccgggcgttctgccgggactgcaaatcgttatccagttcaatcatgagtctatccttcatcagactaaaagagtggagacggggcgcgccctgtcaggtcatgctttgtgctgcgccgcgattttttcgatgtcgttatgcggacgcgcgatgacgcgagaggtgacgacttcgccgatgcgttttgccgcttccacgccggaatccaccgcggcattcaccgcgccgacgtcgcctttcaccatcgcggtgacgaggccggagccgacgttttcatagccaatcagctccacgttggcggctttacacatcgcatccgccgcttcaatacaggccaccagccctttggtttcgataagccctagcgcttctttcatcaggtttttctccggttaatccatgattttgtaatgcgagacgattttgttgatgtcgttatgcgggcgggcgataaccagcgaagtcaccacttcaccgatgcgctgcgcggattcgacgccggaatccaccgccgctttcaccgcgccgacatcgcctttcaccatcgcggtgacgaggccggagccgacgttttcatagccaatcagttccacgttggcggctttacacatcgcatccgccgcttcgatacaggccaccagccctttggtttcaatcagacctaatgcatcacccatttgcgttctcctggccatcaggccttgtgtttaatgacgattttgttgatgtcgttatgcggacgagcgataaccagcgaggtcactacttcaccgatgcgctgcgcggattcgacgccggaatccaccgccgctttcactgcaccgacgtcgcccttcaccatcacggtcaccagccccgagccgatgttttcatagctaatcagctcgacgttggcggctttacacatcgcatccgcggcttcaatgcaggccaccagacctttggtttcgataagccctaatgcatcacccatggtttctcctccagaacagttttgtgattcggaaaaccgaccgcgtaacggcgtcaggacgcggatgcggcgttcggaattcactatagggaatggcgagtgaagtgaaatttaaatctgctagcgtggtatttttagtcttttgctctgtgatttaggttggttaaggcgctgatttatgcatttatgctgcgatggcggggcgaattcagtgacgattgtggcgcttttttcaccatttagccggaggcggattgatgttaataagttgctaatttattgcagatcgggggtaatttgacgatatatgaagtgtggagaggatcgcgttttcttcggcaggctaaatgcaaaacgtgcggttttactcacgggaaagcgaggaaggaaaagcgggtgtgagcttagtcaagcttgctgccggacttcagcgtgcagacgtagagcggggagttgatagaactgagaagaatggctttctcattgagcttctgcgcgttgagaaacaggccatcgtggctgtcggacatctcgcgcataaaatagtcgaagattacgtccggcgactcatcgatggacgaggcgctggattcccacttgctgatgcgatagtggcgctcggtggtggagatgcgtttgctggtgtagctaaatttgacgtagcgctggagataaagccagccggcggcggaatcggtgtagccctcgacgaccatcgaccctttgccgttggcggcaaagttgaaatggatattgccgttaacgttctccttctccatgttctcaaagcgcataatcgctttggtcgagcagctcatcaccccgccgttctcgaccggcagcagcttccaggcgcagaacccggcggcggcaataaataccaggctggagagggcgaaaaaggggcgcggggcgagtctcattgcggtttccatgaatagtaaaaatagttatcgcagtagctgaacgggttatcttcatgcatcgcgcagtgggcgaggaatacccggcccaggccgttggtttccagccggtcgccatagaagaagacgaagcgttcgccgggcttgcattccagcttcaggcgctggcgcacggcatcaaaattcttgccgtaggcggttccggcaacggagcgcagcatctcatcgctggccagcagctcgcactggctgtggcgcatttgcgtcagggtgatggggtgcgatgtgctgccgccgagaaaactgcagaccaccagcagcagggcgatggtgagcaggcagccgccggcgagataccagcaggtaccgcgcgcgtggcggctggaaacggtcttttgctcttccgggaccgcggccgggtctggctcggcttctgccgcgggcggcggctccggctccgggctggcgtcgagcctctcgatggtgagatccggattgagctgcagcagtccgcgcgacacggtgacgataatgttgtcgatatcgtagtggcgaaaggttttgcgcagcatgctcaggtactgattgagattgctgttggatgaggttaacccgttgtcatcccagacttttttaagcacctcatcgcggctgaccacctcggtgtggcgcaggaagaaccacagcagcgcgttggcggtgatggacagctggctgtccgcctcatcgcttcccggtaacgttagcgtgccgtccattgcatcataaataagacggccatggatgttatagcgcatcgtggcctcaatctatcacgtcatacttcacgttgctggtgcgttggctgcgttcgctcaccttggtcacatagttatctatgctcccagggattcgctcccttgccgccttcctgcaacgcgaattatttagtgtatatatgcttcacgcaggaagcgtcatcttcgtcagatcgctgaccagcgactgccggtgcccggggctcatggtgcgcccctcggttaattccgatagccagatgccgtccgccgcatagcgcaccagcgtgccggtatggctattgtccagttcatcgcctttcgccagatggtccagcatccagtcgcgccagcattttcgcagcaccggttcatccggcatggccagcgacagcaccatcagctggcggctctcctgggtatccgtgagttccggcgccgacagatagcgcagataggcgcgggtaaagcggccataagagacgttatccgcggccataagctctgcaatcgcctcttccataatcgccagcaggcgggcaaagagggcgaaaatcagcgcctgcttgttggggaaatggtgcagtaaaccgcctttgctgacgcccgcttcgcgcgcgacggcgttcagcgacagcgaggcgataccgtcccggccggcgatggtggcggcggattccagcagttgtttatgcaggcggacgggatcttttttacgatgttgggcttccatattcatggcccgaatcataccgaccagacggtatgattattcttgatcgctatcaatatgcgaaggggcgcagctggatgggatgacgttattgcgtggaggctcacagttcaccttatgaattgtggtgatattcgctgcgccgcgaatatcacccaccgagattcacacaggcttcacgtggatagcgaggccgttttcgcccggcgccagatccggacgcaggttcagagaggggatcagatagtcgccgtgattctgccgacggaagggaatgggcggcgtttcggagagggtatccagccgccgggccagcgcctcgcgcagcgtggcgaagcgctgttcatcgagtttgtcggtgcggtagaacaccaccggcggcagcacatcaaagccgggatagaacagcatcccgtgctgaatggggaacaggatgtcgtcgatagacccgttaattccgcgcggcgcgtagtgctccgcccatccgccggtggtaacgaccagcatcgcccgtttccccgcgaacgtgccttcgccgtagcgatcgccccagtgggtttcgctgtgctcgccgacgccgtaggcaaagccgtaagcgtagacccgatcaatccagcccttcatgatggcgggcagcgaaaaccaccacagcgggaactgaaaaatcaccgtatcggcccacagcagcttctcctgttcgcccacgatatccgcgctttgcgtgccgttagcgaaggcgtactgcgaatcccgcgttgcccgccagctttcaccgaccggcggcgcgctgctgtcatcggcatcaaatcccgccttccagcgcatggcgtagagatcggacacctgcacgtcgtggccggcgttttgcagatgctgcacggtaaaatctttcagcgcgccgttaagcgaatgcggttcaggatgggcgtaaaccagtagtattttcattgaaatcacctctgagcaatggagagctgcagagtagagtcggcgacgctatagtagaaatgaattgcttcaataacaggtatagcgatgattaatctccaggggctggatctcaatttgctgcgcacgctgaacgttctgctcagcgaaaataacgtcacccgcgcggcgcagcgcctcaacctatcgcagccgtcggtcagcgtgcagctggggcgactgcgggagattttcgccgacccgctgctgctgccgggaccgcgcggaatgcagcccaccgcccgcgccgatgaactacgcgggccgctgcgcgatgcgctgctggcgctggagctggcggtagcgccggttcagcctttcgacccggccacggcggcgcagacctggcgggtggcggcgacggactatatggcgtcggcgattttgctgccggtgctcagtaccctgcgcatcgcctctccggccagccgcctggcgctgtttgagctacagcccgcgcggctggtacagcaggcggatcgcgacgaagtggatctattttttcacacgcgagacggcgcgccgcccgggctgcatcagcgtttgttgttccgcgaacgctacgtgctggcgggtagagcggggcacccggcgctgcggtcggcgttaagcctggcgcagttctgccagctggagcaggtgattgtctccccggacggcggtggattcagcgccgcgaccgatagcgcgctggcgaatctcgggctggcgcggcgggttgtcctttccgtgccacatttcctgtttatgctggagacgctgcgcaatagcgagctggtggcggtgctgccggagcggctggtgcgtggcgctggcggcctgacggtggttgaaccgccgctggcggtcgccgggtttgagatgctgatgctgtggcacgagcgctggcaccgcgatccggcgcaccggtggctgcgccagcaaatcgtaacgtcattagaggaaaagccatgttaagcggattaaatcatctgaccctggcggttagccagctggcgccgagcgtggcgttttatcagcagcttccggggatgacgctgcgcgcgcgctgggataacggcgcatatttttcctgcggcgacctctggctgtgcctgtcgctggacccgcagcggcgcgtcatttcgccggaggagagcgactacacccactacgcgttcagcattgcggaggcggatttcgcgctttttgccgggcgcctgaatgcggctggcgtcccggtatggaaaaccaataaaagcgaaggcgcgtcgcactattttctcgacccggacggccacaagctggagctgcacgttggcaatctcgcccagcgcctggcggcgtgccgggcgaagccctataaaggtatggtgttttttggcgaggacgaacaggcggccgggaacccgtagcccggtcagcgcagcgcgagccggggaaaagtggaggctgtattgcgcgttgtttccccggaggcggcgcttgacgcgccttgtccgggctaccggcccgagcgctcgggtagcgcggctaaacgcagcgtgagccgggaacatcctttacaattcctgctttaaaaatgtgaagttttttccaacattgagagtattatcgctggataattgtctatacttttttgtatatacaatcaggatgaatatgatgccaatggagtttgaatgggatgcaaacaaggcaagaagtaatctaagaaaacatggaatccggtttgaagaagcggtgctcgtctttgacgatccccggcatctttcccgacaggatcgttatgagaatggtgaatatcgctggcaaactctcggcctcgttcatggggtcattgttatcatggttgcgcattcggtccgttttgaaagtggaacagaggtcattcgtattatcagcgcccggaaggcggacagcaaagagagaaatcgttatgaacatggttaaacataaacgtgacaatccggatacgcttacggctaagcgagacgatgagcttaaagcgctggccaacaaaacggatgatgaaatcgattatagcgatattcccgccacagacgacgcacagtggtcagatgccgtacgcggtaaattttaccgaccgctaaaaactcaggcttctgtccgtattgatgccgatattatggagtggcttaaacgtcccgggaaaggttatcaaacgcgactgaatgcgatcttaagagaagcgatgattcgcgatcttaacaagaaatagcctgcctcatgattaccccggaggcggcgcttgacgcgccttctccgggctaccggcccgcagacggctggggaacccgtagcccggctaagcgcagcgcgagccggggagataaatcgcgttagccttccagcttcagttccacattgcgcttgagcaccaggcgcatcagcaggtaatagaccacgccaaccgccagccagctcagccccagcaccttcgcctgcgcgtccatttcataaataacaaagccgataatgcacagccccaccaccgggaacagcaggtgtaccaccagattgcgcgatttctggcgaatgatgtaatggtttatcacggcaatgtgcagcaccaggaagcccatcagcgcgccgaagttcaccagacggctgaggttatcgatatcgccgtagaaccacaggccggaagccagcgaaatcagcgccacaaacagagtgctgacgtaaggcgttttcagccgtgggtgcactttcgccagcagctgcggcagctgcttatcgcgcgccatcgcaaacagaatacgcgacacggcggcctgcgccaccagggcgttggctatcccccaggagatcaccgtcgaccacatggtgacatacttcagccagccgccgcccgccagattcgcggtatcgtagaaggcggtatcgaggctgttgaacgtcatcccctgcgccagatcggcggcaatccacgtctgcaggataaacagcgaaccgaccagcatcagcgcgcccagcgacgccttacccacggtatctacgccgcctttcgtttcctccgacagcgtggagatcccgtcgaagccgaggaacgagagcacggcgatggagaccgcgcccatcaccagcggcaggctgaacttatcggcgttgtagagcgggtcgagggtcagatggcccgccccggcgccggagtagagcgcaatcagcccgaggacgacgaacaccgacagcaccacgatctccgcgatcagaatcgtgttattggcgcgtgcggtaaaggtaatgccgcgcaggttaatcaggctgttaatcgcgataaagccgacaatccacagccagcccggcacgcccggcagcatgggcgccagcgccgccgcgctgacgatatagagcagcgacggcaccagaatatagtccagcaggatcagccagccggcaaaaaagccgacaatgggatgaatcccgcgctgggcataggcgtataccgagccggaaaccgggaacgcgcgcgacatcgaccagtagctcatggcggtaaagaacatcgccaccataccgataagataggccagcgccaccatgccctgcgcgccgtcccagacgtagccaaagacgccaaacggcgcgatgggcaccataaatatcatgccgtagaccagcaggtcgcggaaggtcagcgcccggtgcagctcctgcttatagccaaactgttcgacgctcatgcctgctccccttcgatgctcagggagagctgttcagccactgatttcggtaaggcataacgacaggttttcagcgggtcgactacctgacagatttgcaggtcgccggcgatgctcagaatactgatcgcttcagccagcgtcagggaggtattgtcggtgataaagtgcgccatattgcgggtggccagggcggcggcatcatcgagggtcagcgccgaggcgagggtaaacagggtctcgctgttttcgagcatcggcagcggcagcttacggtttttaaccactgtcagttcgaccagcacttcgccagggatttccagaccgcagaccgagacttcgccatcgcccatcgcggcgtgtaaatcccccagcccgaacagcgccccgggaacgttgaccggcagccacagggtgctgccggcggtaatcattttgcagtccatattgccgccgtggctatccggcgtgccgcaggagatggcttccccggcaggcgcgacgccgatcacgccgaccatcggattgagcggcacgcgcacgttgccaggcagcacggcatggtcattctcaatgggcacgatagtgaccttcggggcatcaagctcgtcgccaatcactccgagctgcggcgcggtgaccatcaccgcctgctgactgctcagggttatacgcttgatggtcaccttgagcgcatcgcccggctcggcgccctcgacgtagaccggcccggtcgccgggttaatacgctgccagtccagctcgttgaacacggcatcggcggaggtgatttggtcggagaagcagtcgcaggtttcgaacagcacttcactgccgctgctgacggtagcgacaggagcgttatcccgcgacatggcgtaaaccacccgatctttggttattttcatgacattcatcccggttatattgttgcgttttttatatttagagtttcccgtatagggaatgagtgaatttatcgggattatcacaggaaggcaatcaggtcagttttttcaaaaataaatggtatatatttgctggtgaatcatgcggttagctatattggtggggttttcttatatgctggttatttagcaaaaaaactttttgttattttggctttagtggtcattcgctaattgtttactgttatggggttattatccagcatattacgctgcagcgtgcggcagtatgattttaaaatatgcggtgatataagcgcattatggggttttaggtgccgtgagaagagaaatcccggaggcggcgcttgacgcgccttgtccgggctaccggcccgcagacggccggaaccccgtagccccggtcagcgcagcgccgccggggaatatagcttaggccagcttacgtttctgcccggcgatcgcgccgattaacgcctgcacctgcttctgcttgcgcgccgacagcttatgcagctggcgcagagactccaccagttccggctccggctgcttcgcggtaatcacgatacagccttccattactttgatatcgattttggcgccggtggcaaaaccggcggctgccagccactggcctttcatgataatcgccgggatacgctgatgatcttcaaagcggctcgcgtaactgacggtgcctttacggttattttccggggagacttctggatcggtgaattctgcaatagaatgcggggtagtcatggtctctattccttttcaataggggttgtgattagcgaggcgctcgtgttgcagcacgggcgtcttgcgataaatacctgtacatatcatcagggaatagacggaaagtccagctgaaaatgaatgaaaataacggcggggataaagggatggattatttctggtgatgggaataaagcggctatttagccgctttattggtttatgggggcgggttaattgatggcggcgtcggtgagggcgtcggccaggtggagctgagtttgttggctagtttgcagacgaattttaagatcagagcaaatcttgatagccagattcacgaatgctatgcatttttgctgggtagcaatagatggaactataatcggaatttcttcgactactttcttgctgattttaggcattgttcccgatgttccagtcattctgtcccacataaatcccctggctaaaggtgatgatagccaaatagaagcatattcgggtaagagatcttcatttgttcttattttcatcattagatctggataaatgatatttttgtgattttcttttaccaaaacattacagccaacaaaatttgcagagtttcccctttgaattaaaatgtcaccctcattaatatacagatgactgttattatcgatgtcaatatctacaaacttggattcttgtatatttagttctccataagaagttgcaccaagctttaagactttgatccgagtattattttttgattctacaggagaaaacccatttcttgggccaaaagaaagaaacgtttttagctttttatactcgacaacatcactgctttgaaccagtttacccatcaccgccagttgcagaatggtctgttttaaggtgtcaatgctggcttcggtggtgaacagcgtatcgaaatgatcgctgatacgcgcccagttttcggccagttcatcggcgttctggctgtcggttagcgtggttaacagggtttcaaccagctgttgatgggcgtccagactggtcagggtgtgctgttccagttggtcgcagagggacataagttcatttgcccttgagacgatttttagttgttcacttaatggcggtaaaggaaataatattttcgatacaattgcccctgatacttctttaaatgtagtaccacttgcctctgcatctattttttttgctgatgccattaggaagtaatatatatattctgcactatctttgatatatggaacacaagatttaaaaccctggtttgttgatagttctgcatcggctatcgcgacatatccaattggtgctcggctagagaaaagtacactcccttttggcattaacctagctgatgagtttgacagtcctgtgggtgaaatatcacgggctccagacgaaatgtacttccctttgagcccatataggtctgccggagtaagccacttaataccatttttggcccagtattgtggattatctgactttggcgtacctccaccgactatttcacctacggtcgccagtgttacccactcccaccccatcggcagctcaaacggtttctcctcctcgctaatctccggcagcggcttgggctttttaatcttcccctgcttcaccagctcggccttttccgccgcaatgcgtttcagcaattcagacgccggttcatcgttcggatcctgcggcaccagcttgccgcgcaccgccagctccagaatcagctcgcgcagctttttaatcccgtacaggtcaatcttacccgagctgccgcgccctgccgtggagcgggtttgcagcgccgtggtccaggtgtcgatatggtcgacaatcagtttttccaccgccatcagttggcctccttaccggagagcgccgcgccgaggatatcgcgcagctggtggcgcagggtctggatctcctgctgctgcttcgcatactgtgccagcagttcatccggatcgtggctgacggtttccgcctggtgcgggtttttgatatcgaggttaaagctgcggacaatcacctcgtcgatgctgaccttccacgcctgttcgttctcgacgcggctggcgaagccgtcggcctcgttgccccaccagtcgatctcggcctgaaattcttcaaacttcatcggcttggttttgctgtagttcttcacgcccgccgggtacgggtgctcgtagaaccagatctctttggtcggctggcctttggtaaagaacagcaggttggttttgatcccggtatacgggttaaacacgccgttcggcagacgcacgatggtgtgcaggttgcactcctcagtgagcagctttttaatcttggttttcacgccttcgccaaacagcgtgccgtccggcagcaccaccgccgcgcggccgtttttcgccagcacttcaataatcagttgcaggaacagatccgccgtttcgcgtgtctgcatctctgccgggaagttcttctcgatgccgtcttcttcggtgccgccgaacggtgggttggtgacaatcacgtccagctgttcatcccacgacgacagcggcttgttgagggtgttgtcgtgacgaatttgcaccggaacttcgataccgtgcagcagcatattggtggtcgccagcaggtgcgggagctgttttttctccacgccgtggatctgctgttgcagcgtctggtgatcggccacgctctgcacgtagttgttttttacgtgatcgaatgcgcaggcgaggaagccgccggtgccgcaggccggatccataattgactcgccgagcttcggatcaacgcgatcgaccataaagcgggtgacggcgcgcggggtataaaactcaccggcattgcccgccgattgcagatctttgaggatctgttcgtaaatgtcgccgaacaggtggcgctcgctggcgctggtgaagtcgatttcgttcagcttgttgatcacctgacgcagcagggtgccgtttttcatgtagttataggcatcgctgaacgcctgtctgaccacaaagccgcgcgggtttttatcgatgggggcggtgaggtttttcagcgttgggaacaggtcatcgttgacgaactccagcagggaatcaccggtaatgccctcggcgttcgccgcccaggtgcgccacaggtagcgctgcggaatagggtattggtagttatcctgctccagttccagcgcctcttcctgggcgtcaaagattttcaaaaacagcagccaggagagctggccgaggcgctgcgcatcgccgtccacgccggcgtctttgcgcataatgtcctgtaatgatttgataaccgagctgattgacatgatgtgttccatgtttcattaacaataaggccttctgctacgcggtggcagcagaaggcgcaaaaggggagtggttacgcggagcggggcggtaagtggtagatttcgctctccagctcgctgatggcctgattatacccattgcggtcgccgaatccgcttttaatgatctccggcagcgtacccatgctgtcgaacggcttgagcttcagcacctgaatactctctatttcctgcacgcccgcgtcggcgtatttatccagcaacgtattcagcaccgcctgcgcggcgtcggagtatttggtgaagtagttgcgcttgcgcacgttctccgcccgctctttgcgggttaaaggcggctgaccatacaccacgtggcacagcatgtcgaacgggtcgagctctttaccgacctcttccgccagcacttcccagataatcccctgctgttccagctccttgatgatggcctgtttgcgctcggcgccctgccatttgcgggtgaaatcatccagcgaggcgtactctttgagcagcgttttgcgggtgtaatctttgaaggattcggtgaccagcttgccgtcggcgtcgtaatactgcacgcgctgggcgattacgccgacggccacgccgttgacgtgaaacttgcgcactttgttctcgtcctcttccggcagcgggccgacatcgccggaatcggtgacggtatacggggcgggatcttcatcgacaccggtgatgtcgtcttcggtctcttcttcgtgttcgtcaaactgctcttcaaaatcagactccgggtcggcgatatcttgcggcgtggtgtccatcaccttttccgggatgccgtcgaagcgttcgtcggcgaacagttcggtggcctttttgaagtcgaggatggtgaaccatagcttgccgtagcgttcatcgatgcgggtgccgcggccgatgatctgcttgaatttggtcatcgactgaatgttttggtccagtaccaccagtttgcaggttttggcatccacgccggtggtcatcagctcggaggtggtggcgataaccggatactcttttttggggttaataaagttatccagctgggctttgccaatgtcgtcatcgccggtgattttcatcacgtacttgtcgttctttttgacctgttccgggttgagattgaccagcgcacggcgcatccgctccgcgtgatcgatgtcgttacagaagatgatggttttatccatcgggttggtgcgtttgaggtaatcggtaatggttttcgctaccagttcggtgcgctcatcgatcaccatcgtgcggtcaaaatctttctggttgtagatacggtcatcgatcagctcaccgtttttatccgtctgacctttggtcgggcgccagccctggagatcgacgtcgatgtcgacgcgcaccactttatagggagcaaggaagccgtcttcgataccttctttcagcgagtagatatacaccgggtcgccgaagtaatcggtgctggagacttcatgagtctctttcggcgtggcggttaagccaatctgcgtggcggcgctgaaatagtcgaggatttcgcgccacgcgctgtcttccgaggcgctgccgcgatggcattcgtcgatcacaatcaggtcaaagaaatccggcgctacctgtttaaaggctttttgttcttcttccgggccggtgatggcctggtacagcgcgaggtggatttcaaaggccgggtcgatggtgcgcccggtgaccttggtcatcgccgtgccaaacggcaggaagtcgttatttttggtctgatcgaccagaatgttgcgatcggcgaggaacaggatccgcttcttacttttcgctttccataagcgccagatgatctggaaggcggtataggttttgccggtgccggttgccatcaccagcagaacgcggttctgcccggcggaaacggcttcaatcgttttattgatggcctgtagctggtagtagcgcggcgctttgccgctgccgtcgtcgtagtagtcctgagtaatcaccgggagctgggcttcggtgtaaccttttgataagcacaatttttgccacagttccgaaggagaagggaattcgccgagggtaatcggtttttccattagttcgccgtcagcaaccgtggcatcgcggaagataaaaccatcgccgttggtggcgaagacgaaaggaacgtccagcaggcgtgcgtactcaatgccctgctgcatccccttgccgatttcgtgtttgttggctttggcttcaatgaccgccagcggaatgcccggcttgtaatacagcacgatatcggcggatttcaccgttctccgtgccgcgactttgccgcgcacgatgaccttaccatcccggagtttgacctcctgtcggatttgcgttgtgtcgttccagccagcatcgaggatggcgggcataacgcgtttggtgatgatgtctgcttccgtcagggtactcaggttcaggtcagccattggggattctcatcaaatagcgatgcgcaaattctacacacaaaatcagatgaaatcattacactctatgtgcattatttgtcttaagtctctgttttagatgaattcgtgaatcctgtactcaacatataaggttttaatatggaaattattaagatttggaaatcctttcttaaacatttcaaacagaaaaaattagactctgcggtggttatctacggagcgatcgccatctatttaattccctataaatttccgttgaaaaattaccttgttgcgtttctttttatatctattttaatcttcgcatgcactcaagaatttcggcttagagaatatattaacttctttgtacgtacatgcaacgaccatttactgactcgatttgctggtattctatcgctaactgcatggtcaatttttttgcttttattgttgtctgctaatgtgtttgtaaatactataacgtattggttagcgattttcttttcgctcctcatcctcattagcagtattttgacggttttagatattgccagaaataatacagcaaaaactcttaaaataatcggtctggcggttaccgtcttttcaggtgtgtttacatttaccagtagctattcagccagtattttctggcaaattagtaatctggagctatcgtcctctccatggttagaatattgctggaaagccacagcatttcttatgttcttcttgtggttatcacagccaatttgttatggattgtttatcacttacggtgataaagcgaaagggtatcgaatatttacattaaccggcgcctttattatgtcagtttttctgtttctgcttgttcctaaactgtttggtgatgctgcttattatgtgttaaacagaaccatcaattttgaatggcgtgatgaagcaaaatgcggcgatctaaaagtgaagaataaaaatgaaaaatactttggctttaatactgataaatataccgttttttattcagataaaaatgataaatggggtttctatgagcttacttgccaaaaaggcagtaacaggaaagatttttatgcagtcgggtatttacctgaatataatattcccgcgtggttaaaataatagaaacgttttccccggaggcggcgcttgacgcgccttgtccgggctaccggcccgcagacggcggggaaccggtagcaccggccagcgcaacctcactccgcctcccactccatcgccaccttcaacgccattcccagctgcaccatcacctctttatgtttatctgtcggcggcagggcgcagttgatccttaagcagttgcggtatttcccggatgctgaaaacagcgatcccggcgcgacctggattttcagccggcacagctgtttcgcgacgcagaccatatccacctgctccggcagctcgacccacagcataaagccgcctttcgggcgggtaacgcagatcccgcaggggaaaaactcccgcagccagcaggtgtaaatctccatattacgctgatagatctgccgcatccgtcgcacgtggcggtgatagtggccttcgcgaataaagttacaggccgccagttgggtggaggggacgttggtaccgctggcggcatatttcatctgcagcagacgatcgtaataacggccgggggcaatccagccgatgcgcaggccgggagcgatggttttggtaaacgaactgcagagcatcacccggccgtcgatatcccaggaatggatggtgcgcgggcgcgggtattcggtcgccagttcgccgtagatatcatcctcaaaaataacgatatcgtggcgctgggcgaggcatagcgccgcccgcttgcgggcatccggcatgataaatcccagcggattattgcagttggggaccaggatcacccctttgatcggccattgatcgagcgccagctctaacgcctcgatgctgatcccggtttccggatcggtggggatctcgatggtttttagccctaatccgcgcagcatctgcatggtgccgtagtagcaaggggattcgacggcgacgatatcgccgggctggcacaccgacagcagcgccagcgacagcgcgctgtggcagccgctggtgagcaccagatcgttggcggtgaccaccgatccgccgtcgagcatcaggcgggcgatctgttcgcgcagctcgcgacgcccggccagctcgtcgtagttcagcacttcgctcaggttgtgctggattgcccggctcagctcgcgccagataggcttcaggctcggctgagtgacgtccggcgagccgccgccgaaggggataatcgatttatcgtggcgggcgtcgagcatggtcagcacctgatcccactgggtgatctcgacgggacgctggaccggacgcgacatcggcggtaccggcggctgggctttacgcggggccacaaaatagccggatcgcggctgcggtacgatcagctgctgctgttccagcgtctggtaggcctgctgaacggtgctgatgctgacgccgtgttcctggctcaggctgcgtaccgacggcagcttttcgccggggcgatacagcccctgttcgatgcgttctgccagcaggctggccagatgttgatagcgggtcatgctgtatccttgatcgtcgccatacagatcaataaaccagtacagattggcggtaaaaatgaggtctgctgtacgttttagcgaatctgtatgttaaagaaaagtattttgtgaatctgtattgtttgcccgcggatccgtgaagataaagcctctggcaaggtgaggaggtagaggatggaatttcacgagaatcgggcaagacagccgtttatcggcttcgtgtttctggcgcggataatcaaaaaaatggtggcttcgtgaacaaacgcgcagaacattgcagcgtatgagcgacgaacagctaaaagatgtcgggctgcgtcgggatcagatcaattaaaaagtgcgattttttacccggcattttcccggaggcggcgcttgacgcgcctgtccgggctaccagaccgcgcagaactgtagccccggtaagcgtgagcgcgaccggggattttcccggaggcggcgcttgacgcgcctgtccgggctaccataccgcgcagagctgtagccccggtaagcgtgagcgcgaccggggattttcccggaggctgcgcttgacgcgcctgtccgggcgaccagaccgtgcagagctgtagccccggtaagcgcaagcgcgaccggggattttcccggaggcggcgcttgacgcgcctgtccgggcgaccagaccgcgcagagctgtagccccggtaagcgctagcgcgaccggggatgatacattcacagaatttatcaattcatgcttatccactcttcgtttcttgatacttaccatgataagtattattttcctcaccgttaagtgaggaaaaaaagatgaccgaagacgacctgtttgcccgccgcccgatggggatgcgcatggcgatggtggtgcgccagtggcgcgcgattattgattctgccatcaccgacaccggcctgacccagtcaagctggacggtgctgatgcagctgcaccagctgggggataacgtctcggtcagcgagctggcggaggtgcagggcattgaactgccgccgctgatgcgcaccctcacgcagctggaaaagcagggctatctgctgcgttctacatcgccttatgacaaacgcatacgcctgctgacgctgacggcggaaggccgcgctattctggagaagctgaaccgcgtgattgagacctatcaacagcgcgtcaccgaaactatccctgaagcgcagctcgccgcctttagcgctacgttaaatcaaatcgcctgcaatctgcggactatccgcgaagaagataacaagatctaaaacactatgatgacccctgaacagaaatttgcccgctgggtaagggtgagtattgccgccttcctggccatattcgcctggtttatcgtcgccgatatctggatcccgctcacgccggactccaccgtgatgcgcgtggtcacgccggtctcgtcgcgcgtctccggctatgtctcccatgtctatgtgcacaacaacagccaggtgaagaagggcgacctgctctatgaactggatccgacgccgtttatcaataaagtggaagcggcgcagatcgctcttgaacaggcgaagctgagcaaccagcagctggacgcgcagatcgcctctgcccgcgccaacctgcgcaccgcccagtacaccgcgcgcaacgataaggtgaccttcgatcgctaccagcgcctgagcaccatgcagaacgtctctcagtcggatctggataaagtgcgcaccacctggcagaccagcgagcagtcggtcagcgcgctcaacgccagtatccagaatctgctgattcagcgcggcgagcgcgacgatgggcgcaatgtcacgctgcagaagtaccgcaacgcgctggaagaggcgcagcttaacctcggctggacgaaggtccgcgcggagactgacgggatggtgagcaacctgcagcttaaccccggtctgtacgccaccgccgccacgccgctgctggcgctggtgagcaaccagaccgatatcgtcgccgatttccgcgagaagagcctgcgccacaccggcgtcaacaccgatgccgcggtggtgtttgatgcgctgccggggaaagtcttcccggcgcacgtcaccagcagcgatgccggtattctggccgggcaggaagaggtcaatggccagctatcgcagccggagcagtccacccgctgggtgcgcgacgcgcagcgcatgcgcattcacgtcgccctggacgagccgctggataagccgctgcccaccggcgcccgcgcgacggtacagctttataacagcgatggcccgttcgcccgcaccttcgccggcgcgcagatccatctggtgagcttcctgcactatgtctattaataccctggcgcgggtcttcaccccgcacggcaacatcgtctacacggcgaacgattttcgccagacgctgcgcatcgccgtggccggcactatcgcactgagcatttcgaccttctacgacgtacagtacggcgtctttttcgtggtttatccgctgatgctgctgtcgctggtgccggtatttaaccgtcacgtggcgcggcagtttgtgttcagcgcagcggtgaactgcgtcgaaatggtgttaatcgtcggctatctgtcgcagtggccggtgattatgacgctggtggtgtttggcctgtacgtgatgcgctttcgctttatgagccaggggccgctgtttctgctggggtcgatgggcgtggtgtgtcaaagcacgatgctcaactttatgagctatcccaccagtaactggcacaccctgatgttctccaatatggaggcctgcgtgatggcggtggcgcttagcgcattgcttaattacttcatcccggacgttgaaccgcgcaagccgccgccgcgcattgaaaaagatgctgcccgtattcgccacgaatcgctgctctccggcagcgtggcgacaatgatctttgtgatctttcaggtctgcgacctgagcgactcgctgtcggcgctgatggcgggaattttaattctgttcccgatgcactatcgcggcgcggtgattagctcgatctggcgcgtggtgggggtggtgctggcctgcctttatatcctggtggtgcagctgattatctacgacttcagcaatcatatggtgctgatgatgccgctgattggtctcggcctggcgtttagcgcccgcctgcacgtgatggagaaggtgggggccggcgtgggcttcgccagcattaccaccatcggcatcatgttcggccagaacctgcatccggaccaggacctggtgttcagcgatctgtaccgtatcacttccgtcaccgtggcgctgatcgtcacgctgaccatggtcttccttatgcatcggctgctgaactgctttgcgccaacccgattcgtagtgaccgaataagctcaggccgccagcgcccgctgcgcgtcgcgaaaagcgttgtgcagcagccgccacatatgatgcgccgccggggaaaagcggcggtcggagttgcgtagcaggtggcactgggcgctgctggcgatgggatgatcgatggggaccgcggtcagaataccgtgggctattgcttcccgggcggcgtatgcggtcataaaagagatccccaatcccgcctggctcaggctcatggcggtggaaaagaggttgcagcgataggccgggtgaaactgccgtccggcggttttaaacatggcgttcatatggcgctgcaggccaaagctgtcggtgagcgcgatcaggcgatattgcgtgagctcatcgatagtgacggcgggcagggcagcgatgggatgctgtggcgagaccacggcgcagatagggccccactgaaagctgtggcgtttaagctccgggttgccgatagggccgaaggcgaccgccatatccgcttcgccgctggcgatatcgttgagcatctcctgcatgctgccgacaataatatccacgaacacgttaggccaggactgcgcaaaggtgctcatcaccgattcaataaaggtggtgaccagcccgccgccaatcctcaccgagatagtcccgccgcgcatatggcgtaaatccttcaggtggctttccagcttttcccggcgctgacggctttcgtagtagtcctccgccagcagacgtccggcttcggtcagcaccacgtttcgtccctggcgttccagcagcggcagctccagcgcccgttccagctgcgctatctggcggctgatgactgacgggttgatgcccagcatatcggcggcccggcgaatgcctccctgaatcccgacttcatacagatagctcatcggcctctcatgcaacatcgtttctcgctcctttgttgacctgtggtcaacaataacaccctttcacaggtatttatcatcccggcaagttatagataatcgtaattcggacaaaaactgacagggaggaaaattctcatcgcttattcccggcgtgctattaaggcggcaaggctcggggagttgaagaataagaaatagtgatgatgctgattaagggaatatggaaaagcttatcagtgaaaataataaattcgaataacaataaattgacataatttcaaattgcaaacaatcgcactaacatttcattatgtgagaggacagggtatgagtgaaaataaaacgttggaatgttcctccgacgaaacgacaaatgagtggaaagtcgggcccggagcctggatttcactgatcgtcgtattgttagttttctccgggttgctgtttaaggttgagggcatggcctggctgggggcgtttgactttaccaccctcggcggcgcgttcggcaccatgaaaacgccggaaaccaacacctttatcggcagcggcggcatcagcgccaaggccggcttcctgtttgccctgtcgctggtgccgacggtgatgctggcgctggggctgctggagatatttacccactacggcgcgatccgcgcggcgcataagctgctgaccccgctgcttcgcccgctgctcgggatcccgggttataccggcctggcgctgattaccgatttacagagtaccgatgccggcgcggcgctgaccaaagagctgtatgacagcgacaaaataaatcgtaaggatctggttattatgggcgcctggcaatattccggcgccggtctgattaataactacttctcgattggctcagcgcttttcgcttcgttaaccattcctatcattattccgctgcttttaatgtttgtgctgaaatttgtcggcgcggcaatcacgcgtctggttctgaataccgcttataaaagggattttgaaaatgaataattcggcaaaagtcggcagtaacccgttcgatattttcgttatcggcgcgcgcaaaggatttaatatcgccatcaacaatctgatgccgaatgtattaatggcctacgtgatcgctgaaatgctgaatttgctcggcgtgatgcagatcatcggccacgtctgcgcgccgctgatgggcctgtttggcctgccgggtgaagccattaccgtattgctgacctcctggctttccgcctctgcgggaaccggcgtggcggtgagcctgttgagcaaaggcaccctcaacgtggcggatatcacgattctcatcccggcgattttcctcatgggttcgcagcttcagtacatggggcgcctgctcggcgtggcggatgtcccgaaaaaatattggccgctgctgatggcggtgagcattatcaatgccgttatcgccatgctggtcatgcgcgtgattgcataatagaaggcaaggagtaagacgtgtcgcgaactttagagcatttcaactatctgcatcaaatccctgaactgggctttgaggagcacaaaacgtcggcatacatcggcgatgcattagaagccgcggggtttcaggttcagcgcaacgtcggcggcaccaccggcattgttgcgctgctggatagcggtaagccggggccggtcgtggcgctgcgggcggatatggatgcgctgggccatatcatcgatggccgcttagaggctcgccatacctgtggtcatgacggtcactcttcggtggtgttgaccgccgcggaagagatcctcgccgaagggctggtgaagcgcgggaagctgaaaatactctttcagcccgccgaagagctgggcaccggggcgatcgcgctgacggacgcgggcgcgctggacgacgtggagatgctgttcggcttccacctcaggccgctggaggagtgtccgaagggcaaggcggtgtcggcgatgtactactccgcctcggcgacggtgatggtcgatttccacggcaaagccgcgcatgccgcccggcctcacctgggcgttaacgcgctggatgccgcgtcgcacgcggtgcaggcggtaaacgggattcatctggcgccttcgctgacctggagcgctaaagcgacgcgctttctgtgcgatgcgggggtaaccaactcggtgccggcgaaagcgcacgtgtgctgggatctgcgcagtgcggaaaatgacggcatggcgacgctgaaagagcgggtggtgcgggcgatagagagcagcgcggcggcttacggcgccaccgtcgatatccagatcgtcaaggagatgcccgccgcgattatcgacgaacaggctacggctatcgtcagccaggcgatccgggaaacgtttggcgaagccggcttaacggcggcgaagagtacgccgggcagcgaggactttttccactatctgcgcctgcgtccacaggtgaagggcgggttctgggggctgggctgcgacctgctgccggggctgcatcatccggagatgcgcttcgaccgcgccgcgctggcggatggcgtgcgggtgtttaaatcctgcattcgccaactgctgggctgagggaacaaacccggatattgtgctcgctgtacgccgccgggcgatgattcgcgccctggttacgcctgcggcggaaactgagccagcagctgataatcatccccggcgacgcgaaacagggcttccgtttggccggggagaatccacttctgttcttcgcccggctcacagctcagataaatgcaaagcccgcagccgccgcgcagctggcgcggaatgtccttcacccggaaggacgctcccgccgcctgcagggctttgcgcatccgcactacccccaccgttgagtgaaataaaaacagatattccgtcaccggcggctcctgtgacgtaagccgatcagcgccgcgccgatcgccccggcaaactgcgcgtcgggatgcgtttgtaccgccatacccacgtgcccctccagcctccgcgcgaaggtcgcgcagtggctgacgccgccggtaaacagcagcggcccctgcgccgacagacggccgataaaattggcgctgcgtcgggccatggcgttgatcaccccggcgaggatcgcctccggcgtcaccccggccgaacgcaggctgatgacctcggattcggcgaataccgtgcacatgctggtaatcgcatggggttcaataccgtcggtgatgctgtcgagctgctcgacgctggcccccagcgtacgcgagatcacctccagaaagcgcccggtgcccgccgcgcatttatcattcatcagaaaatcggtgagattacccgcctcgtccagctggataaccttgctgtcctggccgccgatatcgatgaccgtgcgggtctgcggggccagcaggcgcgcgccgagcccgtggcacgagatctcggtgacctgcttatcggcgaaatccaccagctggcgaccgtagccggttaaggttaaaaaggggcgctcgctcaggcctgcgcggagcgtttcccacgcttcaacgatggcgtcggcggggcgaaacggcgtcgggcagagaaagcggcgctgaatcacgccgtcttcaagcaggatgcctttggtggcggtcgatccggaatcaatccctacggtaatggtcacgcgcgctcctaaagcatctcgataaaggccgccacgcgggtgctgagctggccgatatccgccgtcgaatagtcggtctcaatggcgatataggggatgttgtgctgctggcgcacgtggcgttttatcgccagcgattccaccgcgtaggtgtggcaggcctgcaaaatgacatccaccacgccgtccgcctgatattcatccaccatctggctgagcagggacaggcgctggtcgttcggcgaaatacaggagcagccgatggcgagatatttatcggtcagggcgtcgtaaacgtcacccgtctcctccacgcagcgctcggtggctttcgcgccggtgcagttttcaaaaccgaccacccagccgccgttgtcctcaatggccttcaccactttttccgccgcgccgccgatcgggcagccggtgatcagaatacgcggccgcgcctccagccgtttgccctcttgccactgctggcgtacccgatcggccatgtcgttgagctcatcgatcagcgccgctttatcgaagcggaaggtcgcgccgtagaccacttttaaaatatcgctgccgctgagcgcgggcgggttgagctgcccgacgcgataaaagttcgccagcgcccgccgttcgcggttcttgaggataatcgcctcgcgcagggcggcttcggtaatcggcgtaccaaagcgatcttccaccaccttctgcaggcgcaaaatttccgctttccacagcgctcgcgaggcatcatcgctggcgctgttcggcagctgcatcacgtgcacggctttgaattcggccatgtattcgtacattttctttttgccgtcgcaggtggtttcgcccaccacgaggtcggaaaagtagaagtaggggcatttgtcggtcttgccaaaaccgtagctgctttttatcagcggacagaggttgcgcggcagatccttttccgcctcttcaatcgtctcgtcggaggtggagcacagcgacaccaccaccgcgccggcggcaagcggaatttcctgcggcataaaggtgcagtaggtgccaaccagcggtatgttttgctctttaagctccatgaccgtgaggaaaccctgctggcgggctgcggagaagtggtcaaaaatggcgggtagatcggtgataagcgacatggttttccttccccgtacacgggagatgatgaaagaggtcgcattataaccctgtttactgtgtgtgtttattgatcttccgctagtagacttttttcagatccatctcttcctgaatccgatcgccccacgcaaggtgggtggcgatggccgcatcaatcccggcgttataaaacattggacccagctctttcgcaataaagtcgacaaagaattccgcgtcaaattgctccagttccagctcaaaattctcttcgcagtatttagacagcttctcgcgcagcaggtcgcgttgcggcgggctgagatcgatatcgctcatggcgttccttaatcaatattgttacggtggatcggggctgctgattatatccgatcgcggagagtcagttgcgatatggcgtgatgtttttggccgtaataaagggtattgatgacctcgctcggcggagaattgtgactgagatcacagtactcccgagaaaacgaagataataggagttattctcgtaactttatgaatttaaatgagataatatgatttttatggtgtgaataacatttagttgcgctcgccttttttcagcatgttcggtatctggatgaataatctatgaacctgatttcaggttatctggcttacggaattttcctataagtacattctgacggcgattcatttatcaggggtgaaggatgaaacgcgtaaaactgaatatgaatgtttttgacgctgctctgatgcgcctggattgggtatttgatactttcgagcaggtctgtttatctttttcgggtggtaaagactcgacggtattatttcatctggcggcagccgttgcgcgtaaaaaagggaaaaagtttgcggtattgttcgtggactgggaagcgcagtatttattaaccatccagcacgtacaaaatatgaaagagcgctatcaggatgtggtaagccgcttttactgggtggcgctgccgatgaccacggtgagcggcgtatcgcagcatgagccggaatgggtcgcctggcgggccggggaagaatgggtgaggcaaccgccggatgacgccatcaccgatgccggtttttccctttttatcagccggaaatgacctttgaagcgtttataccggccttttcccactggctggctgcggggcgcagcctcgcttcgctgatcggcatccgcaccgacgagtcgctgcatcgctatatggcgctcacctcgccgaccaaactgcgctttgaggaagataaaccctggaccaccgcctcgccggaagggttcagctatacctgctatcccctctatgactggcggacccgcgatatctggatctttaatcataagtcgcgcctcccctacaacccgctctatgacctgatgcaccgcgccggcgtaccgctgaaaaatatgcgcgtctgcgagcccttcggccccgagcagcggcgcgggctgtggctctatcacattcttgagccggagacctgggagcggatgtgccgtcgggtatgcggcgcgcacagcggcgcgatttacgccaacgccagcggcgactactttgcgctgaagaccaaaatccgcaaaccggcgcattttagctggcgcgagtatgcgctctttctgctcgacagcatgccggcaaaaaccgccgagcattaccgtaataaaatcgctatttatctgcactggtaccagacccgcggtttccctgtcgatattcccgacgagcaggaaaaagatctcggctatcgcgatgttccctcatggcgccgcatctgcaagacgctgctgaaaaacgatttctggtgccggatgctgtcgttcagcccgacgcagccaaagcactatgagcgctactgtcggctggtgagtaacaaacgtaaagagtggaggacgctttgatgtcgccggatgtggctaagacagtgattgaatatctcgagtcgtttgacgatgttgacctgaaaatcaaagcaattaacgaactgaagagcctgatccaccagcacagtcccttctgccgcgagccggtggactgcgtgctgtgggtcgaggccaaaacggttgaggcgaatgactacaaccccaacgtgatggcgacggtggaaaaaaagctgctggaacgctctatcgaactggatggttttacccaaccggtagtggtggctcgccagcagcgacggcacctggtcgtggacggttttcatcgccatctgattggtaagagtcgcccggagctgaaccggcgcctgcatggttatcttccggtgacgctcatcaatgccgaacgcgaagggcagaaagagcgcatcgccgccaccattcgccataatcgcgccaggggcaaacatcagatcgcggcgatgtccgatatcgtccgcgatttacatcgccagggctgggacgatcggcgcatcggcgaagagctcggtatggatgcagacgaggtgctgcgcctgaaacagatcagcggcctgacggagctgttcgccgacgagagctttagtgaagcctggaccgtggagtagcgcctttcgctactcctgcgccagcgcggcttccggctgctggcgtatccggcttaataaacccgccagacagcacgcggccgcgatccccgccgccacccccagcagatgaaaaggcagcctgccgccgttaaaccacagccagcgcgccgcttcgatagagagcgcgctgacgctgaggatcacgatattcagcgaagcggaaacggtgccctttggcagatcgtttgaaaaaagggtaaagcggaacagcgtcgggaagatcagcccgatgccgaaggcgtagaagcaggtgccgagcaccgaccacagccagacgtgcggccacagcaggttgccgaggatcaggatcgccagcccggtcatctggatgggcaccgcgcgccagataaagcgcggacgcgtcgggtcttttacccagcgcgccaccgacaggttggcaataatcaccgcgctgaagaccggcacctgggtccaggcgaactcggcggtggtcagcccgccgtcgtcaatcaggataaccggcgagaccgcaacccagctcatcagtggaatatagctgagcgagagcgtggcggcgccgaacagaaaaacgcggttgcggaaaacatcgcggaaatcgcgcagcacgccgctggcgctgaaggggacgtcgccgcgccggacggtctccggcatattcagcagcagccccagccaggcgataaaccccatgacggcaataatcccgaacagcactttccagtgcacgaagtgcatcagcgccgcgccggagagcgggccaattattggcgcgatcagcacgatcgaggtaataatcgccatcagcttaatggcttttgtctggccgaatgcctcctgcacggtgacgtagccgaccgtggcgataaaacagatgctggtgccctgaacaaagcgcgcggcgaggaactgctccattgaggtggtgaacagggtcgcgaagcaggccagggtaaagatcagcgcgccggtgagcagcaccggacggcggccgatacgatcggagagcggcccgagcagccactgtagcgccatgccgccggccatatacaggctgaccgaggcgggagccagcgccacgtcggcgtcaaagtcgcgcaccacgtgaataatccccggctggataagatcggtggtcagataggcggcaaagtcatacaggatcagcgccgccgggaagaacagcgtggcggaatggcgggcgaaaaaacgggtcatccattgcaacatcggtgggctccttgttgagtctctacgccataaatagccgtttatgcgcgcactatttcagcacttcacactgcaataaatttagggtcaacctaaatatccatgtgtttttaacggttaatatgtattcatgtaagaaatacattaaaaacaaaaagttgaattaaatatgtaaatgcaacagcgacggaatctgtgaaaacagccacagcagcagaccgatagtgccgccaaccagcgtgccgttgatgcggataaactgcaggtccttaccaatatttagctcgatttgtcgcgacatatcgcgggagtcccagcttttgaccgtatcgctgatatggcgcgtcaggaaggcggcaaactccggggctacccggtgcgccgcctgctcaagatgttcgttcagggattcgcgcagcgcctcatcgtggagcagcgtttcgccaaaccattgaccggcttcggcaatgcgctgcttaatgcgtgaatcgtcgctattaacatcgtttttaacccagccgcgcagatcggcccatacttcacccagatagcggttaaaagtctcatcgtttttcagatacgctttgatattgtccgctttttccgccatcagcggatcggacttcaggttgtcgatcagcttcagcgccgcgcgatcgaaggcctggcggatctgatgggcgcgatcctgactcacttcgtcgagcagcgtgttaaccgcatcggtaaccatttcagcgctgtgctcaccgagccattcggtaggcagcagcctggctttaagcggatgctcggtctccagccagtgcacgataccgcgggcaataaacgcccgcgagctgtcgcgctggagcagagcgatcagctggctaatcagcgaatcgagcagcttctggtggcggttatcgcgcgttaacccttccagcatcatagcgctggtttgggttagatcgaccttatcaatcgctttatgtactgcccgacgcagcaggcgctgaatgcgcgcgtcgtcggttagctccagaaagccgctcatcacctgcagcagatgctggccgacccgacgcgcgttttccggctggctgaaccagttaccaagcatcagcgccggttcatagcgccggatcagcgcgaccagagagggcgtatcgagaaatttttcctgcacgaaatagccgagattatcggcaatccggtccttattacgcggaataatcgccgtatgccgcgcaacgaacggcagcggaatacggcgaaacagcgccacgaccgcaaaccagtccgccagcgcgccgaccattgccgcttcggaaatagcctttagcgcaccgacccatggcgttggcggcagcacgagggtagtgataaaaatggcggctgcaatcagcagcagcgagagcgccagcagcttggcgcgtttcagttcagcgagtttttccataagcttaagcatatagcctgacggcgaactcgtgcaaaaactgccacacaatccaacaaccaaaagccatcaatacgccgccggccgtgcgctcgactcgccagacgacggcggaaaggcggcgctgcaccgacggtagcgcaatcagcgtgaccagcaacagatcccatatcaacaccacgctggtcatccaggctccgctgacggcctgctgcaccagcgtgacgttcgggcccagcagggaggtcatcagcgcgaggtagaacagcgcgtttttcggattgagcagcgaagaacccagcccgagaaaaagctgtttcaccagcggcgggcgcgaagccgaggcgccgtgcagcgccagcgtggtcggacggcttctgagcagcaggctgccaatccacagtaaatacgccgcgcccagcagctcaatcaccgtaaacagcagcggctcctggcgcaggatcccccagccgataatggccagaagaatatacagaccgtttccggcggcaatgccgatacacaggccgacgctgccgcgcaggcggtagcggatggcgtagcccaccagcagaaaaaaatccggcccggggctcagcagggcgacaaaatgggagagcgccagcgcggggaaggcggagggaaagagcgtagcgagtatgtccatagcaacctcagtattaatctgaggtcaccttacgccagcgtaaacgctaattattgtctgttattgatcgggactgcgcatactggcgcggcgtggcggcggtatagctgacaaaggttttatgaaagtggctctggtcggcaaacccggcctggtagccgacatcggcgatagtatccccggcgcgcaggcgcgttttggcgaattcaatccgcgcgatattgataaagctggcgggcgtcaggccggtatcctgcttgaaggcgcggatcagcgtctctttgcgcagcgcaaactcatcggcgaggctatccagcgtcggcggcgcctgcagattggttgccagacgactgaacaaacgcgcgctggtctgactaagcgccacaggcgcgagcgggcgcagcggcaggtcgcgcaggaaccgggcgacgctggcgggtagcgcggcggtgttttgctgagtcatcaacgccacgatctgcagataccgggcaaagagcccggcatcgcgaatcaccggccgggaggttatcagccgctcgtgatgcgcatcgtttgccagctgccgccagcaccagcttagctcgagatagagcatatggtagctgcgcggctggccgtcgcgcggattgcagctgtggggcgcctgggcggggataataatcagatcgcccggccgcagcagatactcctgcccgttgcagatacagcgcgtttccccctcgataatcgcccccacggagagctgcggatggcggtgacgtttataggcctgacggctttgccaggtgctgcgcagctccagccagggcagctgttcgtcgcgccagaaggtttgctgaatatcgcgcgtatggctcacggtgggctccttagctgagggggattgctgtttataccatgccgtttccgctggtggatattaccgtcgtgcctgatgacgaaattgtccagcatcgaagagtcgccttactggagctgatgcaaaaacatattcgtcagcgcgatttgctgggcattgtggaacatctgacggccattttgcttagcggatacgctaatgacaggcagctaaaaacgctgtttaattacctgattcactcgggcaaagcgcttcggttggggaaatttatccgcgaagtggctcagcgtgttccgcagcataaggagaagctcatgactatcgccgaaaggttacgtgaagtggggcgcaggcaggggaagcgggaaggtcgccaggaaggacgacttgagggcgttgaggaggggcagcgcgccgaagcgcagcgtattgctcaaacgatgctcgccgaaggtatggccctggaaacggtgctgagaattaccggtttgtcggaggcggatatccggggtgacactcactaacttattgatattacgctgttatttatgagcgatttatgccgatagcgcgctccgttccatttcgggaaaattccgtatctctctgagtctggacgcatcctcagctatctcgactacccttaatatcctgtgcggtatttatgactgcgttaacagcgataacaaggagacatgcgatatggcttatcagacggtgaatcctgcaaacaatcagcttatcaaagcgtacccggcacacagcgacgcggacgtggaagcggctctgcagaaggcggatgcgctatatcattcgtcgtggtcgaaaggcgatatagcgcagcggctatcggtgctgcacaagctggcggatctgatcgacggccgggttgacgagctggcgaaaatcgccagccaggaaatgggcaaactcattgagcaaagccgcggtgaagtgaagctgtgcgcgcaaattgcccgctactacgccgacaacgccaaacagtttttggcgccggtaaagtatccgtccgagttgggtgaagcctgggttgaacaccatcccatcggcgtactgatggcggtagaaccgtggaacttcccttattatcagcttatgcgcgtgctggcaccgaacctggcggcggggaacccggttatcgccaaacatgccagcatcgtcccacactgcgcggaaaccttcgcccacctggtacgcgaagccggtgcgccggagggggcgtggacaaacctgtttatttctcaggatcaggtggcgaagattatcgccgacgatcgcgtacagggtgcggccctgaccggctcggaaaaagccggtagcgtggtggcggcgcaggcggctaaacacatcaagaaagcgacgcttgaactgggcggcaacgatgtctttgtggtcctggacgacgccgatctggagaaggcggtgaagatcggcgtgcaggcgcggctcaacaacgcaggccaggtgtgcaccgcggcgaagcgctttatcctgcatgaaaaaattgccgacgctttcctcagccagtttacgcaagccttccgcgaggtgaaaattggcgatccgctggacgaaagtaccacgctgggcccgctctcttcaaaagatgcgctggagacgctgaccaggcaggtgaacgacgcggtgaaaaacggcgcgaagctgcacctgggcggcaaacccgcgcagcgggaaggcagctttttcgagcccactatactgaccggcattacccgcgataatccggcctacttcgaagagttcttcggcccggtcgcgcaaatctacgtggtgaaagatgacgatgaggcggtgaagctggccaacgattcgcactatggcctcggcggagccgtattcagccaggatatcgacagggcgaaacgcatggcgtcgcggattgaaaccggtatggtctatatcaactggctaaccgataccgctccggagctgccgtttggcggcgttaagcgctccgggttcggccgcgagctttccgatctcgggattaaagagtttgtgaatcagaagctggtggtcgtgcataaataacggcgtgaagacaaaaacctgccatctggcaggttttttggcgttcactgaacttcaatcttatcccagccgctcttaaacatgcagctgtcgacgagcgtatccctgcgcccctcattggcgtcctcaaccgtatagctggtggaaatatccttcttcttgttctttttgtccgttttttccgagcttgaaccggtgacgacgttatccggggggagatcgatcagcgcctgcgcttcgcactccgtgagctttttattcatctccgtatcgctgactcccggcttcacccatttgtactggacgcagcctgacagcagcacggtgaagctcagaacgcaaagcgcggcgaagcggccgttcatcagaaggtaaccccgccgccgacataggcgccgtcaatcagcgtgtggcccggacggccatctttgccgtcgacgctgacatggcgatagcccactttcagcgtgaccggggtgattggcgtccagcttacgccgccgttggcttcaacgtagtttttgacgctattgttcaggccctccggtgcggcatagccctcaccatagagatggatgctgtcggtcagggccacgttgacgccgccgccgatggggaaggccacgccgttatcgccttttttagggccgaggtagatggctttcgcgccggcattgaacatcaccgggccgagttccaggttataacccgcgcctacgccgcctgtctgggtaccgtcatcggtatttttgagccagttgctttccacatacaggccagaagaggatttccccatttccagattcaggttagtgaagttcttgccctgctcaacggtgccgcccatcgcgagcgcggatcccgagacggcagccaacgccgagagaagaaggatattcagctttttcatgttttatgcctcatcattacattacgcggagggcaccttaacaatcgatttttatgactgcaaatcagcgagtgatggctgttttatgctaattttgttattggatatatttatttgtgttgtttgttagttgtttttactgcggagtcaatgggtaatctttagccgttgagcgtgagttgaatcttttggctaaatattcgctgaacaggcgcgaaaaagcggttgtggacgcaataattggctttctaattatttccaaaaacatttctgttgttacatataagaacagagttttacatttaatccgcgcattccccctccagaagagggggaatgcgacatgactacttgcgcaggctcgcaaatgcggtgcgaatctcatcttccggaagctgtatcccaataaacaccagggtactgtgcggccgctcatcgccccacggccggtcccagtcggcgctgtatagccgttgaacgccctgaaacagcaggcggttgggctcgccgtcgatccacagcatccctttatagcgcatcagctgttcagcgaaggtgagcagcaggttttccatcacccgcgacacgtcgctgatatccaccggataatccagctccaccacgatagacgacacgtcgttctgcttatcggccataaagtggaagcgcggtttgctgctgaccacgttctcttccagcataaagccgctggtgttaaacagcagattcaggtcgatatcgccgtgggtgacgttgtaaatcggcgcgcgggcgttaatacgcatcagccgttcgcggagcttgtcgctgtcgcccgccacgtcagttttggtgagcaggatacgatcggcgtagcccacctgcgactgggcaatggtgaactgattcatctgctggtcggcatgcaccgcgtcaaccagcgcaatcacgccatccagcagatagcgttcacacagcacatcgtgagagaaaaaggtctggataatcgggccggggtcggccatgcctgtgcattcgatcaccagccggtcaaaatcaatttctccgcgatcgcggctgtcgagcagatcgagcagggcgtcttccagttcgttggaacgggtacagcagatgcagccgttggtcagggttttaatctgcgtggcgcgatcgccgataagctggtcatcgacggcgacttcgccaaattcgttttcgataacggcaattttaaagccgtgccgttcgttcaggatatggcgcagcagggtggttttacccgcgccaagaaaaccggtgagcagggtgactgcaatcggtgccatgtttgcctccattagcagcagcgtacgccgcctttgccgtcgccgccgtagcgggcctgctggcgttcgcgaaagaattcatcgtaggtcatgtacggcttgtccggatggttagtctgcatatgctcgacgtaattatcgtaatccggaatgccaatcagcattttcgctgcctgaccgaggtatttttttgcctgacctaagttaccaaacattgtgagtcccagagaacgaataaagccggatggcggctagcgcctcatccggcctacaaacattcgtttgtgtagaccggataagcgtagcgccatccggcattaaggtttagtgatgcgaagaggtcttcacgccgccttccggtaccggcacgtacggggtctctttgtcggtacgcactttattgttgcgcacgttgagccaggttttgatgccgtagaagatgatgctgtagaccaccaccaggaacagaatgctcagacccgcattggtgtagttgttcaccacgatatggttcatgttggcaatctgctgcgcggtcagttcgccgccggcggcgatcttctctttatactgctgcgccatgaagaagaagccttccatctgcgggttggtgctgaacagtttcaggcccagcgcccaggtggtgcacagcagcagccatgcggccgggatcacggtgacccagatatatttggtgcgctgcattttgaccagcaccacggtgccgagcaccagcgctacggcggccagcatctggttagagataccgaacagcggccacaggctcttcacgccgcccagcgggtcgaccacgccctgatacagcaggtagccccacaggccgacgcaacccgcggtaccgataacaccggccaccagcgagtcggttttcttgaggaacggcacgaagttgcccagcagatcctgcagcataaagcggcctgcacgggtaccggcatccagcgcggtgaggataaacagcgcttcaaacagaataccgaagtggtaccagaagcccatatccgccatcgggatgattttgtggaacacgtgagcgatacccacggccagcgtcggcgcgccgcccgcgcggttcagtaccgacggttcgccgatatctttcgcggtttgcaggatttgctcaggtgagatcacgaagccccaggagctgacggtcgccgccgcgtgtgcggtgacatccctcagctgggcggcaatcagcgcggcgttctcaccgcccatttcgtgcaggttcggcatggtgatgcccagacccgccggcggggtgttcatcgcgaagtagaggcccggttcgataattgaggccgctaccagcgccatcaccgccacgaaggactccatcagcatcgcgccgtagccgataaagcgggcgtcggtttcgttagccagcagcttcggcgtggtgccggaggcgatcagggcgtggaagccggagaccgcgccgcaggcgatagtgataaacaggaacgggaacagcgcgcctttccacagcggaccggtaccgtcaatgtactgggttaccgccggcattttcaggtccgggttgaggataacaatgcccagcgccaggccgacgataacgccaattttcaggaaggtcgccaggtagtcgcgcggcgccagaatcagccagaccggcagcagcgccgagataaacgcgtagccaatcagggtaaaggtaatagtggtgtctttaaaggtcagcgccgggccccagtacgggtcgtgggcaatcacgccgccgaagtaaatcgacgctaccagcaggacgataccaatcaccgatacttcgcctacgcggcccgggcgcaggaagcgcatgtagatccccataaacagggcgatcggcacggtcgagcagacggtgaagacgccccacgggctttccgccagcgctttcaccacgattaacgccagcaccgcaaggatgatgatcattatcaggaagcagccaaacagcgcgatggagcccggcaccggacccatctcctgcttgatcatttcccccagcgaggcaccgttacggcgcgaggagataaacagcaccataaagtcctgcaccgcccctgccagcacgacgcccgccagcagccacagggtacccggcaggtaacccatctgtgcggcgagcaccgggcccaccagcggaccggcgccggcaatcgcggcaaagtggtggccgaacagcacgtagcggttggtcgggacatagttcaggccatcgttgttaatcaccgcaggcgtggagcgcgtagggtcgagcttcatgaccttttgcgcaatgtacaggctgtaataacggtaggcgacgaggtagacggaaaccgaggccaccacgatccacagcgcactgacgtgctcgccgcggcgcagagcgacgaccgagaggcaaaatgccccgatgattccaagaatcacccaaggtatgtgcttgaataactttttagtatccatagtaaaacctggcttaataagatgaataatgggccgaagccgtctgggtttagttagggtttgaggaggcattgattagctatgctggggaccatcttgccagaacgtcgcgcgcgtaaagttgggtaaatctgtgagtggttatatccggggttaagcggtcacttgcaggggtaagcggttgggcaggaatcccggtaggcttaaatatgtgattgagatcacagggatattcccgccgtgacgatggggggaagcgaggtaatcccctctcccgcgagagaggggaaggcaaaactacgccacgacgtccatctccatcatcaccggatggaagcggcgcttaaagtagatcagcccgtggccctgctggctcagggtaatgttcctgatttccaccagatagaccaggtggctaccgatggtctgcacctggctaatctcgccctcgaggctcgccagcgcgcctttcagcaccggctggcccagcgcgcctttttgccagccgctgaggccgaaacggtcatccatcgtcatcccggtcatgccagcgaagtggcgggccatctcctcttgctcgtggttcagtacgttgatgcacagcttgccgttgccctggaacaccggattcatcgcgctgttagcgttgatgcagaccattaccgacggcggcgtatcggtcaccgaacagaccgcggtggcggtgataccgcagcggcccgcctcgccttcggtggtgatgacgttaacggcggccgacagactggccatggcatcgcgaaaacgcagacgttgttcatctaattgcattgtgacctcccgctgccggttacttcagcagcttatccagcatgttgatatcggtattgttgtgcagatgcggcaccgtccagccgttctggtcgtactcggacaggcagcgatccaccatcgccatcattttgtccatgttgccggagctctgcgcctgacgcaggcactgcaggcgaatctcatcctggctaccggagtagttgatttcgtacagctcatgacggccgccaaactcgctgccgatggcgtcccacatcagtttgaggatcttgatgcgctcgacgtgatccataccgttcgatccgcgcacgtatttcgccagatattcgttgatctgcggattattgagatcgcgggcgctggacggcagatagatcaggccgctggtgacgttgcgttcaataatgtttttgattttggcgtaggccatcggcgccatcacgcgataggtttgcagcgcggcgtgatccggcagatacgcgccgttaacccacggcgtggcttcggcgcacatcgagtcgctcagcgcccagaacatattgcgccaggccaccacttcgccgagatccgcctgcacgccgcggaactccagggtgccggtacactccagcgagcgcttgagaagggcggtgataaagtcgagcttcacggccagacgcacgcaggcctgcagcggatacatgcgggcgaaaccgccctccatcgtccagcggcggcagcgatcgaagtcgcgatagatcagcacgttttcccatgggatcagcacattatccatcaccaggatcgcatcgttctcgtcgaagcggctggagagcggataatcgtagggcgatccggttgctccggcgaccagctcataggaggcgcgggagataagcttgaccccttcggcgtccatcggcgcgacgaacatcagcgcgaagtccgggttttcgcccatcacctgcgccgagccgaagccaatcatgttgtagtgggtgagcgccgagttggtggctaccactttcgcgccgctgacgatgatcccggcatcggtctctttttccagcttgatatagacgtctttcacttcgtcggctggcttatggcggtcgatgggcgggttgacgatggcgtggttaaagtagaggccggtttcctggatgcgggtgtaccagttacgggcgttctgttcaaactgaccataaaacgccgggtttgcgcctagcgcgcagccgaacgcggctttgtagtccggggtacggcccatccagccgtagctcaggcgcgaccattcggcgatagcgtcgcgctgctggcgcagatcgtcggcgcttttcgcgacgcggaagaacttgtgggtatagccgccgctgccggtatcggtgccccagcacagggtatcctgcagctcgggtttatgcagcgcgtcgtacatctgggcgacggaggcggcggcgttgcggaacgccgggtgggtggtcacgtccttaacgcgttcgccgtagatatagatttcgcggccgtcctgcaggctcttcaggtactcttcaccggttaacgggcgtttagcgtcggcacggaaattttcaggtttcataggtgacctcttcagtattaatcggaatgcgatgttaaatttatgttttgtttttgttgttcaattgaagcggttaacgcggctttcgtgaagagacttttaggtcaacggtcggtacttttcaggcggggttgggttatgtgatcgggggttggtttttctattttccggcctggctccccgatgatccgacgacaagccagggtgggttttgaatttgtaggccggacagatgcgcagcatcgcctccgggaaatgcagcgactctgcgctctgctcccgggggcggcgcctgacgcgctttgcccgggctaccgcctctcagacggctgcgaactcgccgcgccgtccccggtaagatcttatgataccggtactttttgcgttctgaacgcgctcggcgagcagccgactaagcggttaaaaaagcgggcaaaataggccggatccttaaagcccagctgccaggctatctcgttgaccgcgctgtcggaaaagagcagtagcctcttggcttcgcgcagctgcctgtcgaaaatcagccgtttgggcggccggttggcgaagcggcggcagatatcggttaaccgggattcggtcagatgcagctcgctggcgtaatccggcaccgtccagtgctgatggtagtggccgtcgatcagctggttaaaccgctggaacagcttgagctcgccgcgtatcccgctggccgcgtgatcgtcaagcttcgcgttgcgcagcaacagggtgaacaccgcctgcgccagcagcgtcagggtatgttcccgccccggcagctgcgacgtcgattcccgttcaatcagccgccagtagtgcgccagcgccgccagctcctcgggcctgtcggccagcgacaggcagatgcccggcagaccgaaagcctcccgcgtgccgggatagagcacctccagcagcggccagaccagatcctcgcgcaccgtcagcacgtgaccgtcgctatcggactcggtgataaaagcgtgcggcaccgagggcggcgtcaggacaaacagcggcgcctgcaccgaatagcgatgatcgtcgagctgcagctcaatctgcccggtatcgagaaagtgcatctgaaaatactggtcgtgacggtgcgcctgcatatcgcggccaaagaactccgccatcctggcaaacgattgataatgcacatcttccgtccccaggctctcatcgtactctttattaatatcgatattggctatcgggctctggcacatggcggctccttacggcgtcgcgcgcggacgcgttcctttcatcggaatcacccagataatcatcgcgccgatgaccagcagggcggcgacgaaccacaggccgctgctgaagctgccggtaatatccttcagccagccgatcataaaggggctgagcgccgatccgatattacccgtcgcgttgatcaccgcgataccgatcgctctggcgcgcaggctgatcgactgatccggcgtggtccagaaaatggccattgcgctaaacgatccggtggaggccatcacgatcccgagcagctggatcaggttgtgatcggtggccgacgccagcagccagcccgcggcggcgaacaggaacggcagggcggtgtggtgcttacgctcctgatgtttatcggagtggcggctccagtagatcatccccagaatggtacaaatctgcgggatcgccgccagcaggccgatggtgatattgctgctgctttcgttaaagcttttgaggatctgcggcgtccagatgctgatcgcgctgagcgtattggtcaggcagaagtaggccagggtgtacatcagcacgatcggcgtgaacacttcccgccacaggctgcgctgctgcatggcgtgatggctgatcgccccttccggctggaccagcgtcaggcggtcgttatccatcatctcctgcaggcattttttatcgtccgcggtcagccatttcgccttcgacggcgaatcatccagccagaaccagaccataataccgagcagcaccgacgggaagccttccagcaggaacagccactgccagccgtgcaggttcagcaggccgtccatcgacaggatatagccggagacgatcgaccccagcgcggtggtcaccggcatcgcgatcataaacagcgcgttggcgcgggcgcggaaaaaggccgggaaccagtaggtcagatagagcagaatgccgggcagaaaaccggcctcggtgatgcccaccagcatgcgcaggatatagaggctgttcggcccggtcgcgaacatggtggcggtggaggcgatgccccacagcaccatgatggtggcgatccagcggcgagcgccaacgatgctgagcatcacgttgctgggaatgccgaatatcacgtaggtggcgtaaaacagggtggtggcaagaccgaacatggtggcgttaaggcccagatcctgccccatggtcagcccggcaaagccgatattgatgcgatctaaaaatgaaaagataaacagcacaaacaaaaagacgatcaggcggcgaaagagcttgttgataaccgactgctgctgcgccgtcagctgcttgtgctgattagccggatcgaacttttccgggatggcagatgatgtatcgctcattatcattttcctctaatgggaattttgtagggtactgcgggtattaatagacgcctgacgaaccctgggcggttttttccgcgccaaatcgcgccgccagcgcttccgcgccgcgggccagcagggtggtatcgacgccgacggcgacaaacagcgcgccgagttccaggtagcgcttcgccagcggctcgctggccatcaggatccccggcgctttgcccgccgcgcgaatttgcccgatggcgcgctcaatggcggcctgcacttccggatgctgcgggttgccgctgaagcccatatcggcgctcagatccgccgggccaataaacacgccgtccacgccctcgacatcgaggatctgcggcagattgttgagcgcttcgcgggtttcgatctgcaccagcacgcacatcgcgtcgttggcctgatggagataatccgggacgcggttccagcgcgaggcgcgggccagcgcgctgccgacgccgcgaatgcccgcgggcgggtagcgggtggctttcaccgccagccgcgcttcgtcggcgttctgcaccatcggcaccagcagggtttgcgcgccgatatccagcagctgtttaatctgcaccgggtcgttccacgacggccgcaccaccggctggctggggtagggagcgatcgcctgtagctgggtcaggattgtctgcacgctgtttggcgcatgctcgccgtcgatcagcagccagtcgaacccggccccggccagcagctcggcgctgtagctgctggtcagccccagccacaggccaatctgcggacgacccgcttttaaggcgtctttaaaggcgttatgcatcatgtttctcctagacaaagcggcagctaatcgcgcccatgttgccgtagtcgacgtggaaggtgtcgcccttgcgcgccggtaccggacgggtaaaggaaccgccgagaataatctgcccggcttccagctggacgtcgtacggcgccagcttgttcgccagccaggccacgccgttggccgggtgattcagcacccccgcggcgacgccggtctcttcaatcacgccgttgcgatagagcagggcggcgatccagcgcagatccagctcgtcgggtttaatcgggcggccgccgaggatcaccccggcgttggcggcgttatcggagatggtgtcgaagactttgcgcgggcgctgggtttccgggtcgatgttgtggcagcgggcgtcaatcagctccagcgccgggatcacgtagtcggtggcgttgtagacgtcgaacagggtgcagtgggggccgcgcagcggtttggccagcacgaaggccagctccacttcgatacgcgggacgataaagcggtcggtaggaatatcgccgccgtcgtggaaaaacatatcgtccagcagcgcgccgtaatccggttcgctgatttgcgaactggcctgcattgcttttgaggtcaggccgattttatgtcctttcagcacgcggccttcggcgattttcatatttacccattcgcgctgtaccgcgtaggcgtcttcgatagtgatcgtcgggtgatccagcgaaatagcgcggatctgttcacgctgtttttccgcctggtttagccgctgggcgatcagggtatgggtatgtttatcgagcatagttgcttcctgttacgtcattcggtgctgctgcgccggaaataaaagccggcgtcgtttcgccctctcccggcgggagagggcctgaccggccgcacgctatttaaacaaggcgtgcacgttgttctgcttgtagttcagcgtcgggtgcagttcatcaatctcaaacgacagcgccagatagcggctctccatcagcgcggcgaaatgggctttgatcagcgtgaacagcatatcgcccacgtcctggcggctctcctggctgcgtccggcgccaattttcagcgtcatatgcacaaaggcgtaatcgtgctggccgtcggccatctgccaggtatccagccagatggcgcggctgcgaatgccgccgatggggaagatgccggtggccgccagcgcggcgttcactttgccgaacaggcccggtaaatcagcctgttcgcggatgttgtcggtacattcagcgataaaatgcggcattctgcgtgctccttacgccgtttccggcagagggaagacggcgttgacctggcctgtgccggagctggcgaacagctcggtaataaactctactttgccgtcgtatttgtcccagcccagcaggcccagaagcatcaccgtgtcgtgcatattgccttcgccgaagcagtagtcggcgtactccggcagcatggtgcagaactctttgaatttgccttcgcgccacagcttcacgacccgttcgtccatctggtgatcgaactcgcgggtatagctgttcatcccctcttcggcgcgctggtcgtcgataaaacggtgcgacagcgagccgctggcaaagaccgccacggtgccgtcatatttctcgatagccttaagaatggcttcgcccagcctgcggctgtcggcaaaatcatgaacggtacagaacgccgagatagagaccactttgaaatgcttatcgctgttcatgtagcgcatcggcaccagggtgccgtactccagcttcaggcttggaatgttatgcgctttggcgcggaccccgagcttgaccgcttcgtcggcgatcaggtggccgagcgccggattaccgtcgtagtcgtaggtcatgtcgcgaataaaatgcggcagctcgttgctggtgtagacgccctggaaatggtcggcacagttgatgtggtaggcgctgttaaccagccagtgggtatcaaagacgatgatggtatccacgcccagctcgcggcaccgcttgccgatttctttatgcccatcgatggctccctggcggcagccgtggtttttacccggcagttcagaaagatacatcgacggtacgtgagtaatttttgctgctaacgctaactttcccatatcagactccccattttgggatcggatggtcgcccatcgagatgcagacgtttttcatttcagcgaacacttcaaagctgtattcgccgccttcgcggccggtaccggaggccttcacgccgccgaacggctgacgcaggtcgcggacgttctgggtgttgacgaacaccattccggcttcgatgccgcgcgccaggcgcagcactttgctgacgtcctgggtccagatataagaggcgaggccgtactccacgtcgttggccaggcgcagaccttccgcctcgtctttaaacggcagcagacaggctaccgggccaaaaatctcttcctgcgccacgcgcatgcggttatcgacgtccgccagcaccgttggccgcaggaagttgccgtttctcagatgggcgggcagatcggcgggcttatccgcgccgccggccagcagggtcgctccttcttcaatgccgaggcggatatagccggagactttctcccagtgctgctggctaatcagcgcgcccacctgggtattcgggtcggtggggtcgccgacgcgcaggcggttagcccgctcggcgaagcgtttaatgaactcggggtagatgctctgctgaatgaagatgcgcgagccggcggtgcagcgttcgccgttgatcgagaaaatggtgaacagcgcggcgtcgagggcgcgctcaatatcggcgtcttcgaaaatcagcaccggcgatttgccgcccagctccatggagtactttttcagcccggcgtttttcatgatgttgcgcccggtggcggtaccgccggtgaacgagaccgcgcgtacgtcatggtggcggaccagagcatcgcccgccgtcgcgccgtagccctgaaccacgttcagcacccccggcggaatacccgcttccagcgccagctcgccaagacggtcggcggttagcggcgatagctcggacatcttcagcaccgcggtattgcccagcgcgaggcacggcgccaccttccaggtggcggtcataaatggcacgttccacggcgacaccagcgcgcagacgcccaccggctgcacgagggtgtagttgagcatcttgtcgtcaaccgggtaggtcttgccgttcatctgctggcacacttcggcgaagaattcgaagttgtgcgaggcgcgcgggatcagcacgtttttagtctggtggatcggcaggccggtatcggcggtctccatggcggcgatctccgggacgttctggtcgatcagatcccccagcctgcgcatcagacgcgcgcgctctttcatcggcagattggcccatttcgggaacgcctctttcgccgccgccaccgcctgattcacctcgtcggcgccgccggaggcgacttccgccagcacttcgccggtggccgggttagtggtatggaaatattccgcggcggcgacgtttttgccgttgatccagtggttaatttttttcatgacagcttctcctcatatgcctgctggctaatgatgtggttgaccaggcggccgacgccttccacttcgacgatcacttcatcgcccggcaccacgtccgacagccccttcggcgtgccggtggcgatcatgtcgcccggctgcagggtcataaattcgctgaggtaagcgatcaggaacggaatgctgaagatcagatcggcggtggtgccctgctggcgcagttcgccgttgacccaggtgcgcagcgacaggttatgcggatccgggatcgcctctttgctgacgatccacgggcctatcggcgtcagggtgtcgcggcttttgacccgcaggttgggacgatagtagttttccaggtagtcgcggatggcgtagtcgttgcagacggtgtacccggccacgtacgccatggcgtcggcttcggcgaccttacgcgcggttttgccgatcaccaccaccagttcagcctcgtagtgcatgtactcgacgttatccgggcgcaccgactcttgcctatggccgataaaggtgttgggcgctttgataaacaccagcggttcggttggcggcgtaaacgccagctcgctggcgtgatcggcgtagttcaggcccagcgcgaacagggtgccgtcggcgggcggcagccagcgaaactcgccttcctgaagtaacctgccgttggcgagctggacctgcccgcgttcatcaacctggacatcgtgccgctgtccctgccactcaatacgtgcttgcctcatgccagctctccttcatcaatcaccgggttttccagcgccgggaagccctcggcgagaatgcgtacgcgatcgccggggcgcagcgtaacgcgggagtggggcgtaccgatcagaatcgcatcgccgggattgagggtggcgaattcgctcagggcgctcagcagctcggcggcggagcgctggagatcggcggtattccagctgtccgcctcgcgaccgttgatttcggtgatgatggtcaggttatcgacgttgctgagcggcgcgagcgcgccaagcgggcagaagccgtcgcggcatttggctttgatggccggacgatagaagctctcttccggcaggctgacgtcgttcgccagcgcgtagccggcgatataagccgcggcgtcttccgcggcgattttgcgtgcggttttaccgacgattagcgccacggtggcgccgctctgcacggtttcgccttgcggatagggaatgctttcgccgtcgccgataacggtgttgcgcggtttgataaaccagaccgcggtcttcggcggggttttatacggggcctgctggaacgcttcgcgccaggcgtcgagctggctgcggtggttaagcgccacggcgaagatggtgcctttcattgaccactcctctgctacggaattaggaagttagttaattcattaatatgttaatgatcatcttttatgctttgcggaaaggtttggcaaacagaagtgaatgttttgtgatctgattaacaataaatttacagttatgttttttatttgttgttaatcaattagataattaattttattgtaccttctggtacttttcagaggcagaaaccggttgccttcagaaggaattagcgctaattattaacttattaacagattggggatttatttcagaggtatgtgatgcatgattcgttaactatcgcgctgctgcaggcgcgggaagcggcgatggcccactttcggcccatcgttaaacgccacaatctgaccgagcagcagtggcgtatcgtgcgtatcctcgccgaaaatccgtcgatggattttcacgatctggcctttcgcgcctgtattttacgtccgagcctgaccggtattctgacccgcatggaacgcgacggcctggtgctgcgtttaaagccggttaacgatcagcgcaagctgtacgtttcgctgacgcctgcgggcctgaagctgtatgaaagcgcccaggcccaggtggaagaggcctatcgccagatagaagcccaatttaccgtcgaaaaaatgcgtcagcttaccgcgctgctggaggagtttatcgccctggggaatggggtgggtggagaggaagaggcgtaattttccttccgtgaagctagaaatatttccccggtcgcgctgtgcttaccggggctacgggccggtgctatcccgtagcccggataaggcgccagccgccatccggggaattcccggccggtcagaacagggtatcgagctcttccagcacgttatactgctcgtccaccagcagcagggttttccatttatcaaacgtcaggcacggatgcgaggtgccgaacaccagaatatcgccgacctgcacgtcgctgcccggcgcgaggcgcagcatacagtgctgatccataatccccacgctctcgatccccgccgcagacagctgcgcgccgttgcgatagcgagcgatcggctgcggcagtccggcgtcgaaggcgcagtcgcgtttgccgaagttgaccaccgcgcgatccgcttccggcaccgactggaccatcgccatcagctccagcgccgaggttaaatcaccgcccagatcgcaggcgatcggatcgcgcgccgccagcgctttctgcgcgatatcgtagatcccccgatcgtgggtgatatagcagccggggcggataacgatccggcaccgcgccggtttcttcgccgccagccagatattgcacaccacgtcataccagacggtaccggcgccggtcagcacaaactccccctcaaccagatgcgccatccggcaggccaaatcggcggcctggtgcagcagagcttccacctgcggctgcggatcgtcgccgtgcaacaccccttcatacagctcaagtccgcgcagcttaaggccaggaaggtccgcgacggcctccgccagggcctgcgcatcctcaacgctgcggcagccgcagcgcccgccggccacgcccagttcaatcagcacgtccagcgtttgccgccgttcgctgaaaaaggccgacagcgcgcgggcgttggcgaggctatcgatgcagcagataaactccgccgcccggtaatgcgccttcaggcgcgataccgcctgcatattcgccctgccgaccagctgattgaccatcagaacgcgctcaacgccgctggccatcgccgcgctggcctgccaggcgctgcccacgccgattccccatgcgcccgcccgctgctgggcctgaaaaatccacggcgtcatcgttgttttaccgtgcggcgccagcgagacgccgcgcgcgtcggcgtagcgctgcatccaggcgatgttattttccagcgccgtttttttcagcagcgcggcggggaggcagacctcctccgccagcagatttgccggagcggccatcacggcggctttgtgcggaataagcgtatcggagtggtatttcataacactatccttttagggtttatgctcggaataaagctgagtatcaattttaattaattgaaaaatataaatttaatatgtgatttttattgtttgtgaataaaagtatcacaatttgatctggtttttgcgtagttttccactgtttttccgccttgtaaatggttaacttgtcgatagagttgaaagggagtcattgcgatgaaagttaactggcttttcaaaaacgtcacggtcattgacggcagcggcggaccgcagtttcgcggcgacgtggcggtgaagggcgatcggattgtagatatggccccggcgctgaacctgccggcggagcaggtgattgacgggcaggggcgcgtgctggcgcccgggtttatcgatgtgcatacccatgacgacatcaacgtcattcgtatgccggcctatttgcccaagctgagtcagggggtgacgacggtgattgtcggcaactgcgggatcagcgcggcgacggcgaccctgcgcgacggcgtgcctgacccgatgaacctgctgggcgagcaggagcactttgtttaccccaccgttgacgcttacgcccaggcggtggaggcggcgaagccgtcattgaacgtcggcacgctgattggccataccgcgctgcgtaataaccatatggacgatctgttccgcccggcgacggaaaccgagattgccggaatgcgggtgcagctgcgcgacgcgctgcgtcagggcgcgctggggctgagcagcgggctggcctacgccagcgcgtttcagtccaccactgaagaagtgatggcgctggccgaggagctggcggcggaggggggaatttataccacccacctgcgttcggagttcgaaccgattctggatgcgctcgacgaggcgttccgcattggccgccacggtaacgtaccggtggtggtatcgcaccataagtgcgccggcgcgaaaaactggggtcgcacgaaggagacgctggctttcttcgatgagatgcgccagcgccaggagatcgcctgcgactgctacccctattctgccagctcgtcgacgctggatatgaagcaggtcaccgatgagttcgatatcgtcattacctggtcggaagcgcagcccgagcaggccggaaaaaccctgcggcagattgccgacggctggcaggttagcctgcacgaggcggcggcgcggctgatgcccgcaggcgccatctactacaacatggacgagcaggacgtgcggcgggtgctgcgttacccggtgaccatgatcggctccgacggtctgccgaacgacccgatgccgcatccgcggctgtggggcgcgttcccgcgggtcctgggccactacagccgcgatgaacggctgtttccgctgaccaccgctatccacaaaatgaccgggctgtcggcggcgcgtttccagctggcggatcgtgggttggtgaaagtgggctactttgccgatctggtgctgttcgatccgctgacggtgcgcgatgtcgccagcttctccgacccgaaacaaccggcggaggggatcgaggcggtgatggtcaacggcgtgatgagctacggcagcgacaaaaagattatcgggcgcgcggggcgtttcctgcgccgccaaatgaactaaggagtgcaaaatgagtattaaacgttatggcgtagaaggtggtaccgggaccggtgggcagcatctgccgttcgcgcgcgcggtggaggcggggggctggctgtacgtttccggccagacgccgatgaaggacggtgaagtggtggaaggcgggattgtcgaccaggcgcgtctggcgattcagaactgcgtggatatcatgaccgaagcgggctacaccctggccgacgtggtgcacgtcaaggtgattctcaccgatgcgcgctatttccagtctttcaataaagtgttccgcgagttctttggcgacaacccgcctgcccgtatctgctgcgtcgcggacctggtggtggattgtaaagtcgaagtagatgtgacctgttataacgcggctcgcgtataaaaatttattaaccagaaatataaacaggatttttgagcgctgaattcattcagcgcttcgtagccttttaccttttacatactcaactggcaggatgtgaataatgaatagtcatatctttttagtcggctttattatttacgcgctggccatgatttggcttggctggtacgtgtcgcgtaatcaaaaaagcggtgaagattttttactcggcggccgttccttaccgctgttcctgacgctgggctccaccgtggcgaccatggtggggaccggttcaagcatgggcgccgtaggcttcggctacagcaacggctgggccggaatgctctacggcgtgggcggggccatcggtattttgctggtcgcctggctgttcgccccggtgcgtaaactgcgctttatgaccatgagcgaagagctctcttattatactggcggcagccatttaattaaaaatatcgtcggcataatgatatttgtggcctctattggctggctgggggcgcatattcttggcggcagcatgtatttatcctgggcgacggggataaatctgacgctagcgaaaattattatcgctctggcctttgcgatttacgtcatcatcggcggttattctgcggtggtatggacggataccattcaggcattaattctctttttcggctttatcctgatggcgattctggcggtggttcacgtcggcggatgggatgccatcgtacaggcgatggatcccagggcgatgagcctgttcgcggtcgataagctgggcgtcattccggcgctatcgctggcgatggtcatcggcgtcggcgtgctggcgaccccttcctatcgccagcgtatttattcggggaaagatgtctcttcggtgcgccgctcgtttgtctataccggcgtgctgtatctgtttttctcggtgctgccggcgattatcggcatggcggcatggacaatgaacccccatcttgagaacagcaactacgccttcctgttcgccaccagcttcctgccggcgatactgggtctggtggtgctgattgccgggctttccgccactatgtcttcggccagctccgatgcgatagccgccgtggccatcatgatgcgcgatgtctacacccttgttaccggaaaaatgccgccggcgcataaggcgataacgctctcccgctggatgctggcgttcgttatcggcctggcgatgatcttcgccctgacctcgaacgatatcatcagctatatcaccaaaatgatctccatgctgatgtccgggctgttcgtctgttcaattctgggccgcttctggctgcgctttaactggcagggcgcgctcaccgcgctgctgagcggcatgctggtgtcgattgtggttctggttaaggcagactggctggcttactgggggaacccgtgcattccgtcggtcgtcggcagcttcgtttccgccatttttgtcaccgtcatgacgccagccagcaaaatcagccgtcagcaggcgctggaaatgattacgcaagagcgggaagggcaggcgattccggcgaagacggcggtgcaggcctcgggagaagcaccatgaaggactatattgccgtcgactggggctctacccagctgcgcggctggctgattcgcaacggccagtgcatcgggacgaagcagctgccgctgggcatcacccgcctgaacggacgatcgcccgccgacgtattcgcggagcatgtggccccctggcgcggcgccgaaatgctgccggtgctgatggccgggatgatcggcagcgatgcgggctggcaagcggtgccgtatctggcctgtccggcggcgatcgacgcgccggggcagcagcgatgcgccgttgctgaaggcgtgtggattattcccgggctcaagattgcccaggacggggagttcaacgtgatgcgcggcgaagagacgcagctgctgggggctatagagctggcgccggcggagtgctacgtgctgccgggcacccactgcaaatgggtacaagtgacggacggcatggtgcgtcattttgccacggcgatgaccggcgaactgcatcatctgctgatgacgcaatcgctgatcggcaaagggctgccggcccagcaggcggacgaggcggcctttgaacaggggctggaaaaagggttggcgcagccgtcgctgattagcgaactgtttgtcgccagagctgcccgggtgctcggggcgctggcggcaacctcggtcagcgactatctctccgggctgctgattggcgcggaggtggcgaccctcgggcagcgttaccgtacctctggcgtcacgctggttggcgacccggcgctgaatgcccgctacagtcgggcgatgaaggcgcgcggaatgacggttaacagctgcagcggcgatgaggcgctgctgagcggcatggcgaggataatgcatggacaagattaaactggtggcgattttacgcggtattcgccccgctgaggcggcggagcatattgagacgctgataaaggcaggatttcgctatatcgaaattccgctcaactcaccggactggcagcagagcattccgcagatggccgcgcgctttggcgagcaggcggtgattggcgcgggaacggtgcttaaggtggagcaggtcgattttctggccgatgccggggcgaagcttatcgtgacgccgaatactcagccggcgaccatccgccgggcggtggcgcgcggaatgcgggtctgcgcaggatgcgctaccgcgaccgaggcgtttagcgcgctggacgccggggcgcagtggctgaagattttcccgtcttccaccttcggcccggactatattcgggcgctgaaagcggtgctgccgccggaggtgccggtgctggcggtcggcggcgtgacgccggagaatctggcgagctgggtcgaggcgggatgcgccggcgccggtctgggaagcgatctgtatcgcgccgggcaggccgtggagcgtacccgtcagcaggcggagaggtttatcgccgccgcccgctgcggttaatcgcccagcggctgcctgtcgacgccgccgcgatggctgtcgagcgccagcttaatccggcgcagcctgccctttgcctgggttttgttggccatcgccagttcggtggccagcacgtcaaccatcgccagcatcgcatagcgtgaagtgctgggcttgaagatatagtcgttttcgcgcaccagcagcggcagcaccagatccgcctgctccgccagcggcgttccggcgggagtgatggcaatgacctttgcgccgtactgcctggcaatcgccgcgctctcaataatttcctgggtatagccgcccagcgacagcacgataaccacatcctttggcgtcaccgccgagctcatcatgcgcaccagcaggccgtcgttctggctgaccaccggcaggccgaggcgaaacagacggtactggatctcctgggcgcagatggtggagccgccgcccatcccgagggccaggatctgccgcgcgtcgctcagccagctcaccgcgcgcttcagcgcctcaatatccagcgcccggcggttggtctccagcacgccgatgatcgactcgtagatcccctgcacgccctcaaggtccggcacatcgaggataaatcgctgcccgaccgccagggattgcgcgagcttcatcttcagctcgcggacgtctttgcagccgagcgcccgggcaaagcgggtgaccgaggcctggctggtgtgggtcaggcgcgccatctccgcgatgggcagctccgccgccgccgcgacatcatcgagaataaactgcgcgatgcgtttttcggtcgccgtgagttccacaaagcgatcggtaatgcaggaaatgatatcgattgaccaggacatacgggtatcaacgggtaagttttgaatggtactttgtaccatattccgccgctgaaatcagcgccggaggctacagcgctaagcgcatggcgcagcgcgtttccggcggcaggccgtgttccgtttccagctcccttttcgccgccagtcccgccggtagccttagctcgcttaacattgaaaaccccaggcgcgtgtaaaacggcgcgttccacggcacgtcgcggaaggtggtgagcgtgaccgccggatacgccgcctggcgggctgtctctataacctgctccagcatcatgcggccaacgcctcgcccctgccacgcctgatgaacggcgatctccacgataaacagcgcatcgtccagcggttcgctcagcaggaagcctatcggttggtcatcggtcacggccagcaggctgtggtcagtttcaagaaacagccggtggcgctcggggcttatcacttcgctttccgccagccaggccagcgccgggatctggcgaaaagcctgggccgccgagcgctcaatggcgggcagaagagggatgtctcgctcctcagtcaggcgtaacgtcgcggcggcggttatagtgttagttttcatcacctcagcatagcagcctccgggagaaatgtatggagcttaccgccgtttccgccacccagttcagcgtcgcgcagctgacgacgatcctttgcgactgtttcgaagattacctggttcccgtcacgctgtcggtagaggtttttgtccagcgttttagcgccgaagggctgagcctgctggattcctgcgtctggctggatggagatgtccccgcggcgatggcggtcgtcgcccgccgcggcgatgaagccaggctggcggcgttcgcggtgcggcctgcgtatcgcggaaagggcgttggccgccggctgatgtcgccgcttatcgacgcgctgcgcgagcagggcgtacggcggatgtggctggaggttatccgcgacaaccacgccgcggtggcgctgtatcaatcgctgggcttcgaggtgcggcacgggctgtgcggctatttaagcgcgcaggccggaagtgacgggccctccgtattagaggatgttgacgtgctggcgctgacgcgcagggcaggcgccgagattaacggccagctgccgtggctgatggacccgctcaccttcagcaccctgccgtgccgggcgctgagcctccatcagcaggctttcgccgtgctggcgaccttatccagcaggccgcagctgcagtttttatgggtcgatcccgccgcccgcgggcgcgggcgggggcgggaaatgctgatggcgctcgcccaacgctttccggggctcgggacctcggtgaccatcccggagcgctttacgccgctgtttcacgccgccggctatacgcccatggcattaaaacagtatgaaatgagcgcaacgttgagcgccccgccgccagcagggcgttgagattcagccgttacgcgggtcgctaatcggctgacgaaccaggaaaatataggccagcgcgccgagggcggtcacgcagccgcagataatcagcgccagctggaatgagtgggtggtatcgacgataaacccggtcaccaccggcgcgaaggaggcgcagataaagctggcgaagttctggatgctgccgacggatgcggtcattctcgaggctaccgcgacgtgaatcaacccccagcaggaggtgccggcaaagtggatgcagaacagcgccataccgattaacagcaccgcggcgatagaggtagtggcctgcggcacaattaacgtaaacgcggcggagcagaacatcccggcaataatgcaaattttacggcttttgatcggcgccatgccgcctttaaccagccagtcggtgacgtagccgttgataagcataccggcggcgccgaacaggaaaggaatggcggccataaaaccggtacttttcagatcgaggctatacgccgtttgcaggtagcccggcagccaggccagatacagccacgcggtatagttgatgccgctgaaacccagcatcattccccacatggttttgtttttaaacaggctgcgccattcggcaaagctcagcgggtcgcggcgaacgttgacgcttccggcgttaaggtaggcctgctcgtcggcggtgagagagatatcttcccggttgcgatagagcatataccagccgatagcgacgaagatccccagcacgccgatggtgataaacatcccgcgccagcccatcatcagcatcatggcggcaaggatcggcgggctgatcgcgacgccaatcgtcgaggcggcgttaaagaaacccatcgggcggccgcgctctttgatattaaaccagtcgttgatcaccttgacgccgcaggggttcatcggcgcttcgccgatccccatgccgatacgcaccagcacgaactgggtaaagctgtgcaccatccccgagaccgcctgaaacagcgaccagaaaaacatccccagccccagcatgatgcgcggacctttacggtccagcagcggcccgcaggggagctgggcgatgccgtaggccagcgagaaaacggacagcagcgccccgatttcggtggcgctgagccccaaatcctcgcgaatcgttaagttcgcgacggacaatgaacttctgtcgaggtaattaatcaccgccgccagaaataacaggatcattgccgttgtctgaatttttttaatgcgagtactacgcgttaacgtattatctaacggaacagtcatcgtctccgcctttcctttatcaaaggttgtctgcgggtcgatagtgatatttcgtgattccacgcctgactcctggttattctatttgaacgacaagtgacatcgaatggtttaaaccccacccacctatttcacagtaaagtaagtcgacttgttttcagcataaataaccttttttctggcgctggtttatgttttgagatctgtgctgctgattatcattttctgtttttaatcggtacttaataagcctgggattcgctctgcctgagcgagttaatcattgattgcttcgccgagttcaggtggttacgcagcgccaggttggcgtccagatcgctgcggcagataagcgcgctcaggatagtcatatgttcatcaatggcgatgatattgcgctgtttaaggtcgctctcatcccactgatagtgaaagtgaaaaattacggaaataatctcaagtgattgattaaaaaatatattctcagccgcggacaggagcagagaatgaaagtcgcgatcgagctgggaaaacatacgaaagctgtcgccgatgctgtcacgcagggcgcgatggcgctcaagcagggttttcgcctgcagccagcgggcgtcgttgtccgggaggttgaggaagtgctgtagcgcgtgggtttccagcatttcccgcagttcgaacagctgctcggcccaggattgttcaaacttcttcatattccactggccgcgcttttcgctttcaatcaggttgtagcggctgaatttcaacaaaaactccctgaccacgaccgggctgacgccggcagcacgcgccagctgtagctcggaaaatatctctccggcgcgcagctggcgctggttaatcatggtgtaaaacgcctgctcgaagagacggttctgttcggccagcgaggcgctggagccatcgaagccgtcctgcatctccggctggcgaaggatctggtagtcctgaccgcgctggcgcagcacgccgcgctcgcacaggtggctgaggatatggcgcacggtggtgcggctgatgttgtacatctccgccagcgcgctttgtgagggcagcggcgacggaagaaagccgcgtgccatatcgtttatgacctggttaatgacgttgtgacgaaggttttgcgagcggctcattatgcatctccatttttttagctattaaagccggatttaaaacagttttgtgcgcgagatttcacaatttttgcaatgaatttattctcacctctgtttttcatcgatatctaaaccaacaaatacggaggaaattattatgacgtcgatgaatacattagtgtgtcaggaacccaaaatattgcgctgggaaaaacgccagattcccattcccggtgatgatgaagtgcttattaaaataaaaacggtggggatttgtggtacggatattcatgcctggggagggcatcaacctttttttagctatccgcgcgtgctcggtcatgaaatatgcggtgagattatcggtctgggtaaaaatattcttaatctgaaaagcggacagcaggttgccgtcataccctacgtcgcctgcggtcagtgtccggcctgcctgagcggccggacaaactgctgcgagaaaatttccgtgatcggcgtacatcgggacggcgggtttagcgagtacctctgcgtgccggtaaaaaatctgctggtggtggatgacgtcgagccggaagccgcggcgctgattgagccttttgccatcagcgcccacgcggtgcgccgcgccgctatccagccgggagagcaggtgctggtggtcggcgcgggccccattggtctcggggcggcggcgatcgccaaagccgacggggcgcaggtggtggtggcggataccagcccggcgcggcgcgaccacgtggcgcagcaccttggtctggccacgctcgacccttccgacccgcagttcaccgaacggctgtgtgccgcgtttggtggttcgctggcgcagaaggtgatcgacgccacggggaatcagcaggcgatgaacaatacggtgaatttaatccgccacggcggcagcatcatctttgttggcctgtttaaaggtgagctgcagatcccggacccggagtttcataagaaagagacgaccatgatgggcagccgtaatgcgacggaagaggattttgccaaagtcgggcggctgatggccgaggggaaagtgaccgccgggatgatgctgacccaccgctacgatttcaggtcgctggctgagatttacgaaaacgacgtgattaacaatcgccagcttatcaaaggcgtcattcatttttagcaggaaaggctatgaaatcgttaaacagaaaagattttcccgggccgcggtacccgacgcgcgtgattcagttcggcgaaggcaacttcctgcgggcgtttatcgactggcagctggacctgctgaatgagcaaaccgatctggcggcaggcgtgaccatcattcgcccgatcaacaccgagtttccgccgtcgcttaatatccaggacggactctacaccacggcgatccgcgggctggacgaacgcggcgaggcggtgagcgaggcgcggattattcgatcggtgaataacgagatcaacccgtggcaggattttgccggctatctggcgctggctcgtaatccggcgatcgcgttcgtattttcaaataccaccgaagcgggcatcagctatcacgccggagaccggcctgacgctaagccgccggtcagctttccggcgaagctgacccagctgctgttcgaacggttccgccatttcaacggcgcagcggataagggatggacgatgattccgtgtgagctgatcgactacaacggcgaagcgctgaaggcgctggtgctgcgctatgccgaagagtggcaattgcccgcggcttttcgcgactgggttgagaccgccaatacgttttgttcaacgctggttgatcgcatcgtcaccggctacccgcgcgaggaagcggaaaagctcgaagcggagctgggctaccatgatgctttcctggataccgccgaatacttctggctgttcgttatccaggggccgcaggcgctggcgaagacgctgcggctcgaacgttacccgctcaatatccgtctcgtagaggatatccggccctataaagagcgcaaagtcgccattcttaacggcgcgcacaccgcgctggtgccggtggcgtggctgtgcggcgtcgataccgttggcgaagcgatgcaggacgaagccattcgccattatgtgcagcaaactatcgacgaggagattattccggcgctggatttaccggccgatgagctgaggcagtttgccgatgccgtgaccgggcgctttcttaatccctggattcgccatcagctgctctctatcgccctgaacggcatgaccaaatttcgcacccggatcctgccgcagctgctgacgcatatccgccagcacggcgcaatcccgccgcggctaacgttcgccctggcggcgctcatcgccttctatcgcgggcagcgcgacgggcaggcgtatccgctgcaggatgatgacgtctggctaagccgttttgccgcaggatgggcgcaggtggcgcaaggccgcccgctgcatgaactggtcaccgaagtcctgcaggataccgggcactggggtgaagatctgacggcaataccggggcttgccgaacaggtcacgcggtatctggaagtcattttgagcgcggggatgcgggaggccctgtcgcggctgtaatcggtttgttgtgcggcgcccgcggatttgggcgtcgttttttttgtgctctgaaccgcaaaaaatgaattaagcgccaatggttggtggatttcccgcatcataagagcctatcccattagggctattttgcttgccattttgaacctgggcagtgctcagacaaaactcgcagagttttgaacgccctcagggcggcctggagggggagcgtagcgaataatcctcacgtactacgtgtacgctccggttcttccgcgctggccgtgttcaaactgcctgcgccaataacgcctactggaagaggctctaagtacctatgatggcattgatgggggatgcgatgcgtaaaacggaactgttggcttttctgcaaaatcagaccgatttttttgatccggataacctgagcgaggtcttcaccgccggctacctggcccggcgttttgcgatgcaaagaaacaccgccagccactatctgaatcagctggtggcccaggatgtgctggtgaagattaatacccgtccggtctatttcctgcataaggccgccttctgccagcagtttttccccctttcccgcagcgagtacgccagcatggcggagctgctcgcggagagcgaccggcagccggaacaggcagatcatttttcattgcttaccggccatgacggtagcctgcgcaagcctatcgaacagatgaaaaccgcgctgttttatcccaacggcgggctgccgctgctgatcgtcggcgacagcggaaccggcaaaagctatatggcggagctgatgcacgagtttgccatcgcccagggactgctgccgcccgatgcgccctttgtcagcttcaactgcgcccagtacgccagcaacccggagctgctggccgccaacctgtttggctacgtcaaaggcgcgtttaccggcgcgcagggcgataaagccggggcgtttgaggcggcaaacggcggcgtgctgtttctcgatgaggtccaccgcctcgatgcgcagggccaggagaagctcttcacctggctggaccgcaaagagatctatcgggtgggagagacggcgcaggggatgccgatttcgctgcggctggtgtttgccaccaccgaagatattcacagcacgtttctgaccacctttattcgtcgtattccgatcctcattagcctgcctgatttacaaaatcgcagccgcggcgagaaagaagcgttaacgctgcagtttttctggcaggaggcccgcacgctgtccgcccgactgcagctgacgccccggcttttacaggtgctgacgcactacgtttatcgcggcaacgtcggtgagctgaagaatgtcgtcaagtacgccgtcgcgtcggcgtgggccaggtctccgggcagcgagaggctaaacgtcacgctgcacgatctgccggaaaatatcatggccgcgacgccggcgcttagcgaaccgatgggccagcaggaaccgctgcttattgaaccgcagaccagcctggtctggctgctgcgcgcgcgcgacccggttcaggggctgatctatgatgctcagtgccgcgttctcgcgctgtatgaggcggtgctgagtaaaaaaacggtctgggaagaggcgcaaaaaagcatgggcgaggagatggaaaccctcttcgatcggctgattttcgataatcatgatgccaacagctcgcatctgctgctgctgataacccatcaggtgcgggaggagttttatcgccttgaaaagcgcttcaatattcagtttaacggcaactgtatctacgccctgagccactacctgattcatcgttctcgccaggcgcagtcgacgatgagcaatgagaaaagccgccagctggaggatttcctggcgcagaaatacccgctgctgtatcgcttttgtgaagagatcctcgccgcgctggcgctgaagctggatattgaaccccgacgcattgacctgctgctgctggtgctgtggttacagaaaaacggcgctatcagtcagcagcaggtgacccgggcagttatcctcgcccacggttacgccaccgccagcagcatcgccaacgtggcgaatcggttgctgaaaagccagctgtttgagtcattcgatatgccgctcgacgtgacgccggaggctatcgccgatcaggtgatggcctggatcgagagccacgcgctggcctccggactggtcatcctggtcgatatgggatcgctgaacgccattcacagccacttcaaccgccggctgtccacgccgatggcgattattaataacgtctcgaccgggatggcgatgtacgtcggggagcgggttttgcagggcgatatgctggaagatatcgtccgggagataggcaatgacctcgcggttgagcatcagctctattacccgcaaacggacaaaccgcgggcgattcttacaacctgcgccaccggtctgggggcggcggcgaatctgtcggcgctgttaaaagccagcattcctgagacgctcggcatcgatattgtggcatgcgatgtggaaaccctcgccgatcccgcgcgccgggcaccgatgctcagccgctatgaggtgctggcgattgtcggcaccctcgatccgcatctccccgatctgccgtggatctcgctggattcgctgatttccggcgaaggaagccgcccgctgatgcgtatcttcggcgaactggcctccgctgagcaggtcagcgagatcaataacctgatcctgaaaaatttctcgctgcgccgggtgatcgagtcggtgacgatcctcgataccggtaaagtgatcaatcaggttgagcagtttttactgcgctatgagcatctggccggctgcgatgtgcctaacgatcgcaaggtggcgctgtacgtgcatatcagctgtctgatagagcgcctgatccgcaacgcctcgccatcccattattccggcaaacagtgtccgcagagcgagctggcgacgctccgcgaggcttttagtgtcatagagagtggatatagtgtcaaaatccccgccgtagagctgtactacattcacgatattctgacgcgggaaactgaatttattcaggaagatcaagagttttaatccccttcattagttgatccttgcgctagccggcgcgccactgtttctggcacgccggttgcaatcaagaaagcagtggaatgcgctttcgaggtaaggatgaaacgacactatatttttgccagccatggcacctttgctaacggtctgctgaactccgtggagctgatcctcggtaagcagccggatatttatactctctgcgcctatgtcgaagaggaggccgatctgacgcagcaggtggagacgctgctggcgcgtttccccgcccaggatgagctgattgtcattacggatattttcgccggtagcgtcaataatgagtttgtgcgttttttatcgcgccctaattttcatttattgtccggtttaaacctgccgctgattattgatttacttatttccgcaggcgaagaaaataccgagaaattaatttctgaagcattaacaagcgccaaagagagcattcagtactgcaatcagacgattgccagtgcgatgactattgataaagacttctgaaatgagggaacaccatgattacgctattaagggttgaccatcgattacttcacggccaggtggccttttcctggacccagtatgtcggcgccgattgcattttaatcgccaacgataatgtccctgaagatgagctgcggaaaaccacaattaagctcgctaaaccgccttcggtaaaactggtgattaaaaatattaacgatgctatcgaatcgataaaaagcggcgtgacggagaaatatcatctgtttatcgtcgtggaatcggtcaatgacgcctggcgtattgccagcgccgtcgaggggataaaaagtattaatctcggcggaataaaagccaaagcgggcagtaaaaatatttctaaggcgatcaatttactgccggaagaaattgaacaactgcagcagctggtcgggaaaggcgtcgaagttgagatccgccaggtccctaacgatcgcaaacagctttttgcgcaatgcgtttaactccgcggaggacagattatggtagaggctctcttactgggtctggtggcgtttatcgcgcaatcggaatatgccctggggacgtcgctgatttcgcggccaatcgtcaccgggctgctgaccgggctggtgctgggggatgtacagaccggcgtcatcatgggcgcgacgcttgagctggcgtttatcggctctttctccgtcggcgcatcgatcccgcctgatgtagtaaccggcggtattctcggcgtggcgttcgccattacctccggcgcgggaacggaaacggcgctgctgcttggcctgcccatcgccaccctgacgctgatcctgaaaaacgtctatctggggatgtttatcccgatgctcagccagaaggctgacggctacgcggagcgggcggatacggtcggcattgagcgcatgcatctgattgccggcttcgggctgtcgctgatgctcgccacggtggtgaccatctcattcctggtcggcagcaatgcggtgaaatccctgctcgataccatcccggaatttatcaaacacgggctcagcgtcgctaccggcattattccggcactcggcttcgcaatgctcgccaggctgctgattaataagaaagtcgcgccgtactttttcctcggctttgtgctgatggcctacctgaaaatcccggtgaccggcatcgctattctcggcgctatcgtggcggtggtgatggttaacgtcaccgcgctgagctcacctcgtacgacgacagaacaaggagtcagcgatgacgacgaagatgatttctgaagaaactctgcaaccgcaggcgcaggaagaggcccgtatcacgccgcgcgatctacgccgggtattctggcgctccttccagatggagttttcgtggaactatgagcggcagatgaatctcgcctttgtttacgcgctgattccggtgctgaaaaagctctatccgcgcaaagaggagctggccggggcgttgaaacggcatctggtgttcttcaataccacgccgcatatcgtcaccctgctgctggggatcaccacggcgatggaggagaagaatagccagcagaagaacatggacgccaacgcgattgataacgtcaaagcgtcgctgatggggccgctggccgggctgggggactcctttttctggggcacgctgcgcctgatcgctaccggtatcggcaccagcctggcgctaaagggcaacattctcggccccattctgtttctgctggtgttcaacgtgccgcacatcctggtgcgctggttctttacccgctggggctatgtgctgggcaccggggttctgcagcggatccagaagagcggaatgatggagagcctgacctacggcgcgtcgattatcggcctgatggtggtcggggcgatgaccgcctcaatgattgatatcaccatccccctctcattcggcgccggagaggcgaaaacccaggtgcaggacattatcaacgacatcctgccctgcatgctgccgctggtgagttttggcatcgtttactggctgctggggcgcaaggttaaaccgctttctattatcggcggaatggcgctggtgggcattctggggtcgtggataggtttattttaacgggagtcgaaaatggtaccaacgatgatgacctatatcagcgaagagtcggcctgtctgacgcagatcctgcgcgactaccggcaaaagctggcggcgattgagacctttgcccgccagcacccggtgcgccgcattctgctgttggcgaccggctcgtcgctgaacgccgccctgtgcacgcgctatttctttgagcagcgcttcggcgtcctggttgagattaaagagccgtacaactttacgcactacgaggcggtcgatccgcataccgatctggtggtggcgatttcgcagagcggtaaaagcgcctcgacgctggcggcgatgcgtaaggtacaggcattgagcctgccggtttttgcgctgacctccgatccgcaaagtccgatcgcccgggcctgcgatgggatactggatatcaataccggtatcgagagcgtggggtttgtcacccgcgggtttagcgcgacggtgctgaatttgctgctgatggcgctgatgattgcccgtgcccaggggaaagccagcgaggccgaggagcagcgctatcttgccgaactgcagcggctggcggcggcgatcccggatgtcattgaccgcacctcgcggtttatcgacaggcatggcgaagcgctgcggggcggcgagcgctttgtcgccaccggctatggcgcgctggtgggcgtcgcgaaggagttcgaaaccaaatttaccgaaacggtacgcgtgccttccagcggttttgaacttgaggcctatatgcacggcccctatctggaagccaatgcccgccatgtgatgctgtttattgaagatgcgccggatgcgcggacccgggcgctgcgggactatatggcgccgtccattgcccgcgcctttacgctgacgctgagcgacgaagaggatgcgcagacgctggcgctaagctgcccgtgtgaacatcacctggcgccgctgctgctgattgttcccgtccagatgctggcctggcataccgccggcctgaaaggcatcgatctggctaaacgtatttttgacgattttgatcgcgtcttaaaaagtaaaatctgattattcaggagaaaactatgttgggttttaatcaggacgagtacctgaccagtgctcgcgagatcatcgctgcgcgcaaacaggcggaaaccgttgccgatgatatttatcagagcggctgtagcgccttatttttcgcctcggtgggcggttctttggcgccgatgatggcaataaatgagtttgcaaaagaattaaccagcgtgccggtttaccttgagcaggcggcggaattaattcatcgcggacataaaaaattaaataaagatgcggtggtggtgacgttatccaagtccggcgataccaaagagtcggtagccattgccgaatggtgcaaagcgcaggggattcgcgtggtggccattacccgtaatgccgattcgccattagccgaggcggcgagctggcatattccgatgtgccacaagaacggcgtggaatatgaatatatgctgctcttctggttattcttccgcatcatttatcgtcacggtgatttcgccaattacgatcgttttgccagccagctggagttgctgccggaaaatcttctgcaggccaaacgccagttcgatccgcaggcggataaaatcgccgctcagtatcacggctgcgactatatgatgtggatcggcggggcggaaatgtggggtgaggtctatctgttctcaatgtgtattctcgaagagatgcagtggaagcggaccaaatcggtgagttcagccgagtttttccacggcaccctggagctgctggaaaaagaggtcccgctgttcctggtcaaaggcgagggtaaatgccgggcgctggatgagcgcgtcgaacgcttcgctgagaagatcaccgaccatctggtggtgattgacccgcgcgactatccgctgaacggcattgatgaggctttccgctggattatggcgccgtgcgtggtttccaccctgctggtggacaggctggcggcccattttgaacaccataccgggcatgatcttaatatccgccgttattaccgtcagtttgattactaagctttgctgatggcggccagccgggctggccgctgcgcgattctccgaggcgcttcccataaaatcatcgccaaaaccaacgaagtaaaaaccgatggtagagtccggctctccttctctttcaggcaagcggacggccatgaaaaaacggatgacctcgacgccgcatgatgcggtttttaagcgatttcttcgccacccggagacggcgaatgattttctcacgctgcacctgccggaagcgatccgccagcggtgtgatttttctaccctacggctggagccggcgagctttattgatgaagatctgcgcgcctggtactcggacgtactgtggtcggtacaaaccccctgcggcctgggatatgtgtatgtggtgatagagcaccagagttcgccggataaccatatggcttttcgcctgatgcgctatgccattgccgcgatgcagcggcacctcgacgccgggcacaaaacgctgccgctggtggtaccgatgcttttttatcacggcgcgaccagtccttatcccttttccctgaactggctggatgaatttgccgacccgcagatggcgaggacgctgtacgcctgcccgtttccgctggttgacgtaacggtgatgccggatgatgaaatcgttcagcaccggcgggtcgctctgctggagctgatgcaaaagcatattcgtcagcgcgatctcagcgggattacggagtcgttggcgacccttgtgatgctgggatacactaaccgcaggcagttaagagtgctgtttcattatatgctgcagtacggcaatagcgccgatccgagcgtgtttctccgccgattggcccgccgtctgccacactatgaggagaggttgatgtctatcgctcaaaagctcaagcaggaaggtcggcaagagggaaggcaggaagggatacaggaaggccgacaggaagggatacaggaaggccgacaagaagggcgcctggaaggcctgcaggaagggagccggcgggaagcgctgcgcattgccggcagtatgctgcagaacggtttagataccgagacggtacagcggattaccggactgtcggcggatgagctaaagccgctgcatagctaatttccacccaccgtcaccacggcccggcgcaaaaagccgccgggcacgatggcttatccttcgcttttcaccactttgatttcaaccatgccgatgcccagctgacgcggagagtggccgagaatattgccctcgttcgtggactgcgggtccggcggcgcaatcgtcaacgtactgctgcgcgacggattatcgaaatgcagggtggtggtggtgacatcattggccagcgttagcgtttgttcgctgttgcccacccgtaccggaatcggcttattggcattcggcccgtaggctttggcggtaatcaccagatcgaatttctccggcagcggctctttatattcaattttcacttcactgccgagctgggcattagaccagcgcccccaggtttccggtcgggagatgccgctgaactgcttcacctcttccggcgcgccggcgacgttaaacaggaagctgtcggctttatagcgaatatcgttatcgacgatcttcagcgtatcgacgttgcctttataacgctccatatcgataagggtatctttgaacgcggttttaccttgccactgggctttgtcgacgcgctggactttctgttcgccccccagctggccctgcgagacgcaccagtcggtggagagcgccacttccggcgaccacagctgacccatcttgtagcagcggtcgacccagacgaagttatcgcgcggcgcgaaatcggccagctggaagcgcagcggcgcggagtattcgctttccggcagcggctcaacgcgcttatcggagatacgcagcagcagaggcaggcggaaatggctgccggagaaggagatcatattcttctgtgaatccacggtgaaattcttcatctctttggggaaattccacaggcgtatgatatccggcttccacgccagcaccttctctttcatattgaggaacacggcggagagcgactcgccggaaaggctgctgcggccaaggccaataaagttatcgccgccgaggatatcgagcaccgtcgcgccgttatccatggtattacgcttgatggccagcgtatcctgccggggctcatcgccgcgcagaacgaaaaacaggttgctgcgatcctgcttattcagatagtcccaggcgctgtttttcattgccaggtgatcggatgacaccacgatgaccgtatttttgaaccacggcgaagctttaatcttctcgattaacgccgcgatatgctcctgactacaggagacggcgctgaacgaaagattctttttaccgtccatatcgtagcttttacgctggcaggtgcgggagataaaaccatccggatgatgggtgtcgaccgtcagcgcaaacagcgaaaagcgttttccggactgcgaaagcgcttcgaattttttccaggtttcatcaagaaccgtatcatcgtagaacccccagtcgttacgataggccggatcggcgaccgtggtttttagctcttccgcgccgtacagatgatcgaagccgtgagatttcaggaaaacgtcttttccggcgaagcgcagattagcgccctgcacaaagtagttctcataacccgagtttttcaggatatctccaaggcagatattctgcgggaaaaagctggaaaccgaggccgaggcgttgccttcaaacggcgcaaacagcgggatcccgcactgggaggcgaccattccggcaatcgtgtagtcggtaccggggagctgggcggtgttgctgaagtccagcccctcgcttttcagtttgccgagctctggggtcaggttcgggaacgcatcgttatcaaaataagtgcgctcaaggctttcgccgtaaatgtacaccaggttcagtttcgggttggcgatgctttttgacggctctttgtagtaagccacaaagtcaggatcgccatcgcgggactgggatttaaccaactcgctaatctggcggaaggcggggctggcatccactgacgccagcgccagaaccagcgccaccaggctgtaaccaaagtgatgaggatgatgccggcgacggcggagcacccagccgagtgcgccaaataccgcgaccagcgcgacgaccagccccacgcccggcagaatatatttgcccacgccggcgcccgtcaggctgttggtcaacgtataaagtaccgcgtcattgataccgtcgccggtgaagtaattgctggcgtagagggtaatattcagaacaacgaacaggcccagcaccgtgagggtggcggcgaaccaccaggtattacgaccggcttttaatgcgtaaatcatcaccgaagcaagaaacagggcgatggataacaactctgacacagctcatcctcattcacgccagctgtcggctggccagatagatcttttttcacgctacactgtaattgcagcgcaatattgccgcaattgtatcgtcatgaatttgtgctgtggttcagaattggtttagaaatcgccgtttttgaactgcctcacatccagtcagccaggggatttgggggaaagatgttaaaaaacagacgttgccgccgcgcaggccagggtaacgcgccaaacgcggcattaagaggataaaatcaggagaggaagctcacgccctgttttaagaccagatcgcaggctttggttttcactttttccgccagcgggctgctgccaagggtgttcagattcagctgctggccgtctttactggtcagcaagccctgaaggccctcaagatagctggtgtcctctttttgtttttccggcgtgctgagacccagcttatccagaacctgatttttaacgttttcggtattggtaaccgaagccagcttctgtttcgcgcagtaagacataatcccggcggcattattcatgctgctggaagtcaacgactggctgccgccgttgagcaaaccggtcagcgaagagagggacataccgccgctttgctggcttccgctctgactgctgagctggttagcggcgctggagagcgaatcctgccaggaggtggcgtgcgcgccaaaggtcaataaagcgccggccaccattgccgtgcggaacaacgtttttgcagatttcatagacgtactcttcgccgtgactgaataatcccctgattataacgccggcggggttcagaaatatcttaatactcttttccggttacgcgatcgcggtagctgtcccagttgaagttaacccacaggctattgcccagccgcatccggtccatcacgcgctcgccgagcagcttgttcatctcgtccatggtgctgttggttaacataccggtagggcgctttgacgaagagcggcgatcgacgatctggttaataatcactttttcgtagcgtgattccgtttgcatgccgatttcgtcaatcaccagcaggtccaccttgctcaggtcggtgagcagctgctcttcgctggtttcccggttgccaaaggtatctttcatcgctgacatgatatcggcgacggtgataatcaacaccgacttaccccgaagcagcagttcgttgcagatagcggcggcgaggtggttttttccggtacccggtttgccggagaagataaagctggcgatattgccgtcgaactcctcgacgtactggcgcgcccgggacagcgcaatcatctggccttcacactccacccggtagttatccagcgagcagttttgatgcagcgggcggatgccggagcggttaaaggttcgctgcattttcatggcccggttttcgcgttccagcgcctcagaacgcagcttgccctgttctttttgccatgccagcagctcctcacctgtcttaaacgcgggttcgacatgggctggcatcatcttttgcaggcgcttcattaaatcgccgacatttttcatgctcatcctcggaatcctcgtggaatgtgattatcaggttcgctaatcgcgttgacgtcccggcgcggctggccgccgttgctggcccggccaatctgtacgctgcgcgccagcttctgctgccactggacatgatgaaagactttaccttccgcctgccagtaagcgacaaatgccgccagctcttccggcgtcacgggctggctcagggcgatgccccacagcgcggccaggcgctgaaaatccgcatccggctgccagtcggcgtacatcggaaatttccccatcggaaccgcaacgggggtcgccgtcggctcgtcaaaaaactgcgcgtccagcgcaatatcgctgttaggacgcgcgagttttgcttccagctccagcagctgcgccagacgctccggcgtcagcgcatagaatgcgggggcgttgttggcaaatacggcgacggcgccgctggccgattttgccagtaccgctgcgtgatcctgcatgaagtcatccagaccgctaaaatcggtagttaatattcgtgaagacataaatcaatctcaactctgaacaactaaaaagagaggggtagctgcacacatagtagcatagaggtcgctcaggaaggagcgccgcgggcgacccggcggcgcgattagctagacgcgcggacgcttgcgatacagccaaagcccggggatagacaagccaatggataatgcgccaacgatcgatgaagccttaagaaagttgctcagcagcataatcatcatctcttccgagtagccgaaatggctgattttcaccgctgaaatcatcgcggtataggcggagataccggggaacatcgggatcaccgccgctacggtaaaaatcttcgggtgcgccagataccagcgggaccactggataccgatgctgccaaccagcagtgccgccataaacgtcgcccactcaatattaaaacccgccgtcatcatgaccatgcgcgagccgtggccgatagcgcccagcagcgcgcaccagcgcagcgcccgctgcgggacgttgaacaccatggcgaacccgacggcgggaatggctgccagcatcatatccagcgccagttcgtagagatagaaaattatgcccatccgcgtagcccccacatcgtcatcgccatcaccacgccgatacaggtggcgagcgtcagtaggctggcaatggcccagcgcgccagaccggtgttgatatgccccttaaacatgtcggcaacggcgttgatcagcggaaaaccgggtaccagcagcagcacgctggcggccatcgcgatcgtcggcgtgctggtgaaagccggcaggcgcagcatcagcccggagatagtcgttgcgacgaaggcggtgaggcaaaagttgatttgcggatgcattgaacgatgggtgagtacctggcgaatatacatggctaccgtactggcgcagaaggtgaccagcgcaccgtcccagccgccgttgttaagtttgcaaaagcaggcgcaggagaggccgaccatgaaaaccagcagccagcgcggatagcgcagcggcttgatttgcgcgaatcgcttttcgacatccttataatccagcagcttatgctctgccataatcacaatatgttgaacctccgtgacgacgtgcatgttgatgccgcgatcggtgttttttcgcgttgaggtcagacactccccgtccttaatagtggtgagaacaatcgcattcgaagagatggcgctttccacgctatccatccctaaggccagacccagacgggttgagagctcctcaaccagcgcgctttccgcgccgtgttgtaataagaaaagaccacattgaatacacaatcgcgtgatagcgcgctgagttgcccgatctgcttgcataaatacctgctgtccgtgatgcccgttgccgtagtgtctggcgatacttttacctgaagtcttgttttagctgagcggtcaggatcaaacaatgtgtaaaaaaccacccgctctacgggaaccctgaaatttgaactctgccacacttccgcaagattggtgaaaagtccaatttttgcacccgtttctcccttctttttcccatcagagttatcaaaaatgcaaattcaaacttttaataaacaaaaaacaaacaaataattaaccgtgctgaggcgatgcgatgaaaacacaggtggcgattatcggagcgggtccgtcgggactcctgctggggcagttattacatcacgccgggattcagaccgtcatccttgagcgacagacgcctgagtatgtgctggggaggatccgcgcgggaattctggaaagcggaacggtagaactgctgcgcgaagccggggcggggcggcgaatggatgcggaagggctggtccatcacggcgtcgaattcttgtttgagggcaagcgcgtaccggttccgctgacggaactgacggcaggcaaaagcgtgatggtgtatggccagaccgaagtgacgcgggatttgatggcggcgcgggaggcatgcggggcagcgacgatttatggcgtcagcgatgtcaccattaatgaggcaaaaagcgatcgaccgtcggtctcttttatcaacaatggcgaaaactgccgccttgagtgcgactttatcgccggctgcgacggctttcacggcgtgtcccgccagagcatcccggcaggggtgctgaaagagtacgagagcgtctggccgtttggctggctcgggctgctggccgatacgccaccggtgaacccggagctgatttacgcccaccacgagcgggggtttgtactctgtagtcagcgctcactaactcgaagccgctattatctgcaggtaccgcttagcgaaaaggtggaggagtggtctgatgaacgtttctggactgaactcaagcggcgtctccctgatgagctgaccaataagttagtaatcggtcactctcttgagaagagtatcgcgccgctgcgcagctatgtagtggagccgatgcagtacgggaggctatttctgctgggggatgcggcgcatatcgtaccgcctaccggggcgaaggggctgaatctcgcggcgtccgatgtgaactatctttggcggatcctgcgtgagtattatcaccatggccgtattgacctcttagccagctactcgcgtttggcgctggatagagtgtggaaaggtgagcgattcagctggtttatgacgcgtctgctgcatgattttccgcaacaaagcgagttcgacagaaaaatgcaggcggcggatcgtcgctactatcttgaatcacgcgccgggttaaccactatcgctgaaaactatgtgggtctgccgatggaacgcgtggcgtaatagaaaaggctctggagtcgtgatgcaggcagcgagtaccattcccgttttcaaactgtatggcgaagatcagggctggccaacgcccgatcttctgcactgtgagtctatactccagcgcagccatctttatgaatggcatatccgcgtgcatcagcacgcagagctggtgcagctactgtatctgcataaagggcgggcggagattgaaatcgaaggcgcgacgaccgtgatgacggagtcctgtattcaggtggttccggcgctatgtattcatggatttcgcttttcgccgggtacggagggctacgttttgtcgctggcgctgccgctgctcggaagccttgaaaatcagtttggcagtcagctggatgtgctcggccacccgcgttgcgtgccggtgaagagctcccggggccatatccgggcgctgtttaccgctttgcaagaggagtaccgcgaagattacgatgcgcgcgaaatgatgcttcattcactgctgggagcgctgttggtctggctgaatcggcaatatcaaccgcagctcataacggaggacaaagcggaacgtaagcggagcgtcatgcgtcatttctcgcgccttatcgaaagccactatcgtgaacatatgccattagccgggtatgccagggaggtgggggtgtctgcgactcatttgaattatttgtgtcatgaattttatggctgcagcgcactgggggttttacatcaaaggttgatgcttgaggcgcgtcgcaacctgcagtacaccagcatgactatcgctcaactttctgattacttagggtttactgatgcggcctatttttctcgcttctttcgccgctatagcggtgaatcaccaaaagtatttaggaaaaaaataaaataaataaatctttatttaatatatcttaagttagcgtatctaacgacgatgttaaccatttctaatttattgatgacaactacctgtgttaatgttaatcattggtatggataacagcaatatgttactcctcattattaagttggctttagggtgcgatatcgcgcacccgccagggatgataaatattcatttgggcaaaataattacgatgactattaaattatgcatccaattgtttttccgccggcggtgagtcttcgacaggaagcggagggtttatgttaccaggacaaggtaagttcggcattattatcagcagaataccggttatgcagtccggcttaaaagccatcgttggggagcatctccctgattatgaattgagtttttgtcgttctcaggatgagctaaccctgctgcagctgcgtcgtgcagtgttagtcattgctgacttgtccggtgaaatagagcatccaagaaatatttgcgaacattactactctttaatgactcaatacagggatatacactgggtctttatggtaggcaacgcctgttttccgttagctgttcaattattaatgcgtcctgaaagtacattaatttcggacagcgagccggtaaaacgtctcattgaggttgtgcgcgcgggtggacttgccgctgaacgaattagccagacgttgttctctcctgaggtagaacgcatcgatgaagaaccgcaaaagctggttattctgactctttctgagcgtaaagtgttgagacttcttgcaaaaggatggggaattaatcaaattgctgctttattgaagaagagcaataaaaccataagtgcgcagaaaaatagtgctatgcgccgcttatctttgcgtagtaatgcagagatgtatgcctggattaatagtgcacagggaatgaaggagctgaatatttattcagcctatggagatcaaacagaatggaaaaagacctcacaacaagatatgtcgctatcgtagagaaatgtgcgatgacagaagtggcgcttcgccacatattaattaatgaaagtggtaagaattatcgtattcagttctttaaagatacgatggcgttaaaacgggagtttcaggcgagagatttttctgcgattattttttcactttcaggtaaccgcagatcccgacttgaaagcttgctctttcttcatgagatcgcgcgttattgtcccgacacgcaaagaattatcttagctaatgatgaagcggaaatgcgtttggtcagccatctgacgccttctcgcttacacggtattttgaataaatcggcctgtcggctacagctgcaggagtgcttgcttcagcttctcgagcgtagctatccggcgaatgagagctcgttaagccaaaagcagagtatctatagccaacttttgagcccaacggaacataccatcctgcgatatatgtcttatggctactcgttgccggaaatagcgacgcagctggaacgcaatatcaaaacgattcgggcccataagtttaacgccatgaccaagctcggcgtgagttctgatatgggactactgagcgcggcagacattcttatgcgcctgtcggcgaataatgatgatgccacggtgatgcgccttgctcagtagcctcagcggtctgttaaagacacacgtcaatccacttagcatcagtcagctgcgccaaccgttcaggtgaaatacgaacggcgctatatattgaacctgctgctggcagcacttccgggtactgcctcagtgagatatcgcagtacacagccagcggaacttccaggccaaatgggcagacgccgccaatggggtgtcccgtcagcgtaatgacctcatcgctgcttagcatacgggctttggcgccaaaggcttcctttagctttttattatccaggcgtgcatcgcctttcgcgacaacgagaacaaccctttcttttatttttaaagacagggttttggcgatttgcccgggttcaacgttatgcgccgctgcggctaacgctaccgtggccgtgctctgagtaagttcgatgatttcgatatcgggggcgtggtcagtaaaaaactgccgcacggactgcagactcattggaatctcctgattaaggcttgttaaaaatctgtcacaagcttcgcaaagtgtaaatatccatggtagagaatcaagattctttttaatttctggatctccttcacattcaccgcaaccggttactgtaaccggttgcggttattcacggagacaggaatactgacaaggtaacttccctgcgtcacctataacaaagagccgaagatgaatcgaacctggttgagcagtcgggccagcaggctacccgattgggtaaccctctcgccgaagcgggttcatcataacggcaagataatcgttgttgggcctgttcatctagcctgtcaggagggctgctatgtctgctaaccatgctgcatttaatctgatatttcgcttcgtagaaaattacatcagccctgtcgccggacgcatctcgtctcagcgccacgttatggcaatccgcgacggttttatctccgccatgccgtttatgattgtcggctcttttctgctggtatttgcgtatccgccgttttcaccggataccacatggggatttgcccgcgcctggctggatctggcaaaagagtttgaagggcgaattctgacgccgttcgatatgacgatgggcattatgtcgatctatatttgtgccgcgatcgcctataacctcggcaagcattacgaaaaaaccaatcagctcgacccctttatgtgcgccatgctgtcgattatggccttcctgctggtggcggcgccaaaaacgaacggcagcctgccggtagatagcctgggaggaacgggcatatttacggcgattctggtggcggtctactgcgttgaaatgatgcgcttcctgaaggcgcataatatcggtattcgcctgccggatcaggtgccgccgatgatcaaaaactcgtttgatctgttgatcccggtactggttgtcgtcctgacgctctatcccctgagcctgcttattcagcatcattttgatatgctgatccctcaggcgattatggctatctttaagccgctggtttccgcagcggactccttacccgcaattttgttggcggttctggtgggccacctgctgtggtttgcggggatccacggtgcggccattgtttccggcatgctgcaaatgttctggctcactaacctcggcatgaaccagcaggccctggctcagggggctccgctgccgcatatctttatggaagcgttctggacattctttattgtgattggcggttcaggggcgacgatggggctggtattctgctatctgcgcagccgctccgcgcatctgcgttcgattggccgtctgagcgtggtgccaagcctgtttaacatcaacgagccggttatttttggcacccctatcgtgatgaacccggtattctttattcccttcctgctggcgccgatggttaacgccgtactggcctgggcggcaatgaagctggatcttatcggccgggtgatttcggttgtaccgtggactgctccggcgccgattggcggcgcgtgggcgctggggtgggatttccgggcggcgattctggtggtcgtcctggcctgcgtttcggcgattatctacttcccattcttcaaggtgtacgagaaacagctgctcgcgcaggaggccgaagaggcgcagcgcatggcggaagagagtcagcaaacggcataaaaacaaacgggcggctgaatagccgcccgtttgttttcaccatcgattatttcagcgtacagtccccgcactgctgtacgtccggcaggcgatagcgctggcagcaggtgcggcgcacgagctgcccttcacgtaaaaccaccgtacgccacagcgggttatcctcaccgcctgatagctgtttgttgaagaagaagagctgacgcagcgcggccactttttcatctccgaccagggttctcatttccccgagataccagttaatcaaataacccgtattgctccagataagtttgccattgatatcgccagtggcttcaagcgcctgcaccacgggttgcaaagcggtggtgaccagcttttccatccgggactgcgcggattctgccggggaagtacctgctgaatggatatcaatccagaaacaggcggcacggcctgtttcatgaaactcgacgcgaaaatgctccggcgccaggctaacggcgcgttcttcactcaacagcgccagcattaaagggggcaccaataaaccgatgtaccattgtgcccagagggatagcagcggtttttgctcacgggcttgcccgggctggttgcgataaatatggtcagaatacgtcgcgattaacgaactcagcgtcgcgggctgcgaccactcagccagggtgagggcatgatgaggggcttcttcattcagacggataaaatccagcaaatgcggacgtaacgcggtaattttgtcccgtattgcgttcgccagttcacgctcagccgaagggagcggagcccgccagatgatctcattgttgaatgcgagtgaacggtaagccatcgggtgccagatacaaatctaaatgataatgatttctgatactaatgccgcggcaccggcttggcaagagatttgtccgcgcggcgacgcctgccgcgcggtaaaggcctagctggtgagaataatgttacgtcccatatttttggcttcgtagagcgcgttgtccgcccgtttcagcgcgctgtcgatatccgcatccatcagcggcgtcatgccgatactgatggtcacgttggtcgcgacgctttcattaaacatatgcgggattttcagatcgtagacccgctggcggatgcgctctgcggcctgaagagcgttttccgcactgctgctggtcaacagtaccataaactcctcgccgccaaagcgggcaacgatgtcacgcgagcgcacggcgttacgaatggcggcggagacctgaatcaaagcctggtcgcccatcatatgcccgtagtggtcgttgtaggctttgaaatgatcaatgtccagcagcagaacgtaatgcccggcgccgtcgagagaaagaatggtgtccagccggttttgtaagccccggcgattatacaaaccggtaagcggatccaacatactgagatcgttaagggtattgcgttccttcagcagcttatccatgagcccctgcgtgaatacatcgctgcgtttctgaataaggctttgcagggtgataccggcaataggcaacagaaagcaccaggacatgcgcagccattgttctcctccgccaagaatcaggcagataaggtatgtgggtaaagagtgcaaagtaaagccaatgatattgctggaaaaagcaatggtgccaataaataacacgcttaataaggcgatcaccaggtagttaaaatgcggcggccccatcaccattgcttttagcgcaacgtgccacgcccaaagcaggccaaatagcagagaaataaccggaatatttattttgtgctgagagaatttacagtgccatagcagcaggaccgtgctgcaggcaactatcagaaaacagggtaatgtaaaagtgatgacggtaaagagcgggctgacaagggataagacggatgaaactaaattaagcagtaaaaatagccgtaaggaatactgatatttctgttcgtaatgggagcgccaggattgtgcagtcatgtcggagttgtcattattaatcgttaaaattcaatgtgatgttagtttgaagtgaataataaaaaacagtgcgcaaaataaggtttttacgaaataatcagataatttaatatattatttttttgccgcttaatttatcaccttcatgaatgtatgtcattaccacaaacgtaaagaataaggacgcgctattttcctgggatgacaaatgataaaaattatcatatgatattggttatcattatcgttgtaagaggcgaaaacatgttgcagcgaactttagggagtgggtggggcgtgttgatccctggcgtactgattgccgtcctcgggtttgccgatttgtcggtagatgcctggcgcggattggtgacgctgggaatgctcatgtcagcggtgatgatttggcaccgtcagctaaggcactttgttctgctgccatcatgcgtggcgctggtcagtgggatgatgctggtaataatgaatttgaagctgatgggataaaacggaagggtaagaatattggtgcgaggggggggacttgaacccccacgtccgtaaggacactaacacctgaagctagcgcgtctaccaattccgccaccttcgcacagtattcttaatttttgatatcgcctcgttggtgcgaggggggggacttgaacccccacgtccgtaagaacactaacacctgaagctagcgcgtctaccaattccgccaccttcgcccagtgcgagcaatatcaacgtggattatggtgcgaggggggggacttgaacccccacgtccgtaaggacactaacacctgaagctagcgcgtctaccaattccgccaccttcgcataccatcgacactatgaaagtatcgttaccacggaggcgcattctagtggttttcagctattcgtcaatagttaattgtatcagttggattgattgttgcaaaaatggacggtcagagaggaaaaacatcggcgaccagcgtctgctggcgccgaaaaaacgcgggattatttcttcgcctgacgggtcatcaccgtccggtagaccttaaagcggcccgtttgggcaatcacttcatggaagccgaagatctcatccagcacgttcggatagggcaggaaggcgttagcgacgatgcgcagctcgccgccgctgttcaaatgacgaacggcgccgcgaatcagcgtttgcgcggcctccaggctggtctgtagaccatcgtggaaaggcgggttggagataatcatgtcgaagcggccgttcacttcagagaacacgttgctggcgaacacttccccttcgatgccgttagcggccagtgtggcgcgactggcttcaactgccggggcgctgacgtcgcacaacgagaggcggactttaggcgagtggctggccagcacggttgccagcacgccagcgccgcagccgacatcaagcactttacctttggtatgcggcgtcagcgtggaaagcagcagctggctaccgacatccaggccatcgcggctgaagacgcccggcagcgttttaatcgtcagattatccagcgaatactcgccccagtactgttctgcattgaacgcgggctgtttttccaggcgaccgtgatacagcccacagcggcgcgcgctgtcgactttgctcagcggcgcatattccgccagcatctgctcggcgctgcgtacgccgctgcggttctcgccaaccacgaaaatatcaataccggtcggcagcagcgaaagcaggttcatcagctgaaactgcgcttccggtttgttctttggccagtagtaaatcagcgtatcgcaatcggcgacatcgccggcctctgcgaccaggctatagcgggcattttcgcccatctggcggctcagtacctgccagtggtggaactgctgggtatgggcgcggctggcggccgtgtccagacgtgcgggcaggtcatcctgcaggtcaccggcaaacagaacgcgggcggactcgaaatcatcactgtggcgcagcaagacttcacttgccggggtaaaagcggacatgaaacactccttcattaagactggcgccgattatacacgttatctttcggcctgcctctttgttggcggcgggatgcgctccgaccgccgcgtagtttgttggcgcagatacgacggatttgctatattgcgcgcttaattaacaggagtgtttcgctatgacatcccgacgagactggcaattacagcagctgggcatcacccagtggtcgctacgtcgtcctggggcgttacagggtgaaatcgctatctcgcttcctggacacattcgtctggtgatggtggcggaagaaccgccatcgctgaccgaaccgcttatcagcgatattctgcgcgcgctggccctgatgccggagcaggtgatgcagctgacgcctgaacgcgttgcgatgctgcctcaggacgcacgctgtaatagctggcggctcggcaccgacgcgccgctgctgctggcgggcgcacagctttccacgcccgcattcgatgaacttcagaccagcacgcctgctcgcatggcgctctggcaacagatttgcgcacatgaacacgatttctaccctcaatccggctgatttgccccgcgcctggcaaattgaaacgcgcgcccacgcttttccgtggagcgaacagacgtttgccagtaatcagggcgagcgctatctgaatcttcaactgtccgtggacggcgtgatggcggcctttgccattacgcaaatcgtgctcgacgaagcgacgctgttcaatattgccgtcgaccccgctttccagcgtcgcggtctgggcagggcgctgctggaacgggtgattgatgaagttgaaaaacgcggcgtcgtcacgctgtggctggaggtgcgcgcgtctaacgtcgccgccatcgcgctctatgaaagcttaggctttaacgaggcgacgattcgccgcaactattaccccacggtcgacggacgtgaggacgccatcataatggcactgccaatcagtatgtaagacaaggtgatacgatgaagtgggactggattttctttgatgccgacgaaacgttatttacgtttgactcatttagcggcctacagcggatgtttctcgactatagcgtgacgttctccgcagaggattttcaggactaccaggccgtgaataagccgctatgggtggattatcaaaacggcgccattacctctcttcagctgcagcatcagcgctttgacggttgggcggaacgcctgaacgtccctcccggcgagctgaacgccgcgtttatgaacgcgatggcggagatctgctcgccgctgccgggggcggtatcgctgcttgattcgctgcaggggaaggtaaaaatgggcatcatcaccaacggttttacctcactgcagcagacgcgtcttgaacgtaccggactgcgcgatcactttgatttgctcattatttccgaagaggttggggtggctaagccggatgcgcgtattttcgactatgcgctggcgcaggcgggcaatcccgatcgttcgcgggtgctgatggttggcgatacggcggaatcggatattcgcggcggcgtgaatgccggcctggcgacctgctggttcaacccccatcagcgcgaactgcccgcggacctccgcgcggactggacggtcacctctttaagcgaactggagcaactcctgtgtaaacactgattgcctcccccccattgatgggtaaaatagccgcaattttttcgtattcaacatgcgcggcgcgttgccgcgtttactaagaagattgaattatgacgttgtctccttatttgcaggaggtggccaagcgccgcacttttgccattatttctcacccggatgccggtaaaacgaccattactgaaaaggtactgttattcggacaggctattcagaccgccggaacggtgaaaggtcgcggctccagccagcatgcgaaatctgactggatggagatggaaaagcagcgcggtatctccatcaccacgtccgtgatgcagttcccgtatcacgactgcctggttaacctgctggataccccgggccacgaagacttctccgaggatacctaccgtaccctgacggcggtggactgctgcctgatggttatcgatgccgcgaaaggcgtcgaggatcgtacccgtaagctgatggaagtcacccgtctgcgcgatacgccgatcctgacgttcatgaacaaactcgaccgcgacattcgcgatccgatggagctgctggatgaagtggaaaacgagctgaaaatcggctgtgcgccgatcacctggccgattggctgcggcaaactgttcaagggcgtttaccatctttataaagatgaaacctacctgtatcagaccggtaaaggccacaccatccaggaagtgcgcatcgtgaaggggctggataacccggagcttgatgccgcggtgggtgaagacctggcgcagcagctgcgcgatgagctggagctggtgcagggcgcgtctaacgaattcgataaagagctgttcctggcgggcgaaattacgccggtattcttcggcaccgcgctgggtaactttggcgtcgatcatatgctggacggtttagtggagtgggcgcccgcgccgatgccgcgcaaaaccgacacccgcaccgtggaggccgcggaggagaagttcaccggcttcgtctttaaaattcaggccaacatggacccgaaacaccgcgaccgcgtggcctttatgcgcgtggtttccggtaagtacgagaagggtatgaagatgcgccaggtgcgtatcggcaaggacgtggtgatctccgacgcgctgacctttatggccggcgaccgttcgcatgtggaagaggcgtatccgggcgatatcctgggtctgcataaccacggcaccattcagattggcgataccttcacccagggtgaaatgatgaagttcaccggtatcccgaacttcgccccggaactgttccgccgcattcgcctgaaagatccgctcaagcagaaacagctgctgaaagggctggttcagctctctgaagagggagcggtgcaggtgttccgtccgatcgccaataacgatctgatcgttggcgcggtgggtgtgctgcagtttgatgtggttgttgctcgcctgaagagcgagtacaacgttgaggcgatttacgagtccgtcaacgtcgcgaccgcacgctgggtggaatgcagcgacgcgaagaaattcgaagagtttaagcgtaagaacgaaattcagctggcgctggatggcggcgataacctgacttatatcgccccgaccatggttaacctgaacctgacgcaggaacgttaccctgacgtccagttccgtaaaacccgcgagcactaatcctctccggagcgcggttttcgccgcgctccacgccattttcccctcggattgccctttctggaaagttcttaattcttaccgttttgcgcgcttttttacccgttaatgccgcactcttccgcgtatctactacatttaataagtaatttttggaatcctggcttaatagactacttattttgctttacctgcttagatataacgaggaacaacgatgacaaaacttaagagcggcaagacactcctggccctcttcctgggctcagcaataatcagcgcttcggcgtatgcggaaaactcgaccgcagatagcgcaaaatctgcagcaagcaatgccgggcaagccgtcgataattcgatgaacaaagtcgggaattttatggacgacagcaccatcaccgccagggtgaaagcggcgctgatcgatcataaagatattcgcagcaccgatatctctgtgaaaactgaaaacaaagtcgtcacgttaagcggtacggttgacagttcagagcagcataagcaggcgcttagcgtagcgaaagcggttgaaggcgtgacctccgttaacgacaagcttagcgtacagaacgaaaaatctgcttcgctgaagggctacgccggcgacacggcggtgaccagcgagatcaaagcgaaattactggctgacgatatcgttccgtcgcgtaacgtgaaggtggagaccaccgatggcgttgtacatttatccggtacggtagagtccagtaagcagtcggagcgggcggaaggtattgcgaaagccgtttccggcgtcaaaagcgtgaagaatgaccttagcgtcaaataaatctattcactaaaaaaatttattctgcggtctttccgcaggatgtgtagcaccacagggttgtgtatgcgcggcctgagtgcgcagaaaatcgaccgtcattaactatggtaaggagagacgtatgtttagatggggcattatttttctggtgatcgcgttaattgccgccgctctgggctttggtggcctggcgggtaccgctgcctgggctgcgaaaattgtcttcgttgtcggtattatcctgttcctggtcagcctgttcaccggccgtcggcgtccctagacgttaacgcgtgaaataccgtcttacataaagccagtcaatgtgactggctttctcagtttcagggcgttaaaaattgcgttacctttgtttttataataagccagacaggaaagcagggtggggcagcgaattcccgttacgttgggcaacattacgccgttatctgttaaacccttccagccgggcaggctcgcactggtgtgcgaaggcggggggcagagagggatttttaccgccggggtactggacgaatttatgcgcgcgggattcaacccgtttgacatgatgttcggtacctctgccggggcgcaaaatctctcggcctatctgtgcaaccagcccggctatgcccgcaaagtgatcacccgctacaccaccgcccgcgagtttttcgacccgatgcgttttgtgcgcggcgggaatcttatcgatcttgactggctggtcgacaccacctcgaaaaagatgccgctggcgatggcctatgctgaagattgttttgctcagggaaaagagttctggatgtgcgcctgtcgcggcgatgattacacgccaaactacttttcccccactcagcagacctggcttgacctgattcgcgcctccagcgccattcccggtttttaccgcagcggcgtgctgctggatggcgtgagctatcttgacggcggcgtcagcgatgcgatccccgtacaggaagcggcccgtcgaggggcgcaaaccatcgtggtgatccgcaccgttccgtcccagatgtactacacgccgcagtggtttaaacggatggagcgctggcttggcgaaagtagtctgcagccgtttgtgaatctggtgcagcatcacgaaaccacctatcgctccacgcaagagttcattgaaaaaccgccgggtaagctgagaattctggaaatttatccgcagaaaccgttgaagagtatggcgttaggcagccgtcttccggcgttgctggaggactacaagaccggacgccagtgcgggcgctactttctcgctaccgtcggtaaactgctggccgacagaccgccgctgctgcgccatgcgccgcgtattgcggtaccgaaaacggtcgttattccgccagcgccggtggccaatgagatccctcaggcgccggtcatcgcggcggtgcaggccaatgatgccagctttgaaaatgaggacctggcgtgaccctacgatttattgatacccactgccatttcgattttccccctttcaccggcgacgaaagcgccagcattgcccgggcggcggaggctggcgtgacgcagatcgtggtacctgcgacagaagcggttaacttcgcccgcgtgttagcgctggcggagaaatatgatgcgctctacgccgccttaggcctccacccgatagcgattgaacggcatagcgcagagagtcttgaacggcttgaagcctgcctggcgaaacgcgacgctaagctggtcgcggttggggagatcggtctcgatctctatcgggaagatccgcagtttgcacgtcaggtttctgtatttgaggcgcagatgcggctggcgaaacgctacgatttgccggcgatcctccactccagacgcactcacgacaagctggcgatgctgctgaaaaagcacgctttaccgcgaaccggcgtagtgcacggttttgccggtagccttcagcaggcggagcggtttgtgcagctgggctacaagattggcgttggcggcaccattacctatccgcgcgccagtaagacccgcggtgtgatcgcgcagctgccgctttcggcgctgctgctggagaccgatgcgccggatatgccgttgaacggtttccaggggcagccgaacaggccggaacgggcggctcgcgtcttctccaccttatgtgagctacgctctgagcccgcggaagagatagcgaataccctgattgataatacaaatgcgctttttgcgcttccgtagcgctttgctgagtgacctgtgtctcattcctgcctttttatctcattgttttgcttaaaatgtgtgagctgaaatgagcatgatggtttcatgccgttataatcgcggggttttaaggctgaactctcaatacacagggactctgtatgcaaattatcatgggacttgtcggcatggtggtgctgttagccatcgctgtgctcctctccagtaatcgaaaagccatcaacctgcgtaccgtcctcggcgcctggattatccaggtggggatcggcgcgttaattctctacgtgccggccgggcgcaccgcgctgctggccatgtcgaacggcgttgccaacgtgattgcttacggcaatgaagggatcggctttatctttggcgggctggtttccgacaagatgtttgaagtcttcggcggcggcgggtttgtttttgccctgcgcgtcctgccggtcatcgtcttcttctcatcgctgatcgccgtgctttattacctcggcatcatgcagtttgttatccgcattctcggcggggcgctgcgcgcggtactgaaaacctcgcgcacggaatcgctctctgccacggcgaacatcttcgttggccagaccgaagcgccgctggtggtgcgtccatatatcgccaccatgacccgttccgagctcttcgcggtgatgtgcgggggcctggcctcggttgcgggctccgttctggccggttacgcgcagatgggcgtaccgctggaatacctgattgccgcttcgtttatggcggcgccgggcggcctgctgttcgcgaagattatcgtgccggaaaccgagcagccccgggacaacccggcgatggaaaaaaacgacgccgatccgcaggcgccggcgaacgtgctggatgccgccgcgtccggcgcggcttccgggatgcagctggcgcttaacgtcggggcgatgctgctggcgtttatcgcgctgattgccctggttaacggtattctctccggcgtgggcggctggtttaaccatccggatctgtcgctgcaaatgatcctcggctgggtcttctcgccgctggcgtgggtgattggcgttccgtggaatgaggccaccgttgccggctcgtttatcggccagaagctgattatcaacgagtttgtggcctacatgaatttcggtgaatacctgaaagccgacgccgaggtcgcagccgccggtttgcaggtgatttcaacccacaccaaggccatcatctcgtttgccctgtgcggttttgccaatctgtcatccattgcgattctgattggcggactgggcggcatggcgcctaatcgccgccaggaaattgcccagctgggcatgcgggccgtggcggcggggacgctgtctaatctgatgagcgccacgatagcgggcgtcttcctcgcgctatagcgccgtcgttaatcacgaccctaccccgcggcaccgccgccgcggggaactctcctctgcgtgttaaaatcctatcatttaataattatctgtttatcaatcactcatgatgcatctggcattttttcgcacaaaatgtccgcgctgatatcgaggtttaccgcgtgggtatgttacaataataacattgcctcgatgctgagattcctgattatgcttaaagagagtctggccttcggggggcatgcacagggatttattatgtgattcatatcactctacagtaatgcaaattagtaattagttttcattaactgtgatgtatatcgaagtgtaacggcgaggggatgttacaatagtaacagactcgcaaggtgaacaaactttaatacggcaatacgccgtcggagtatgaaatgactgatttaacggcaagcagcctgcgcgcgttgaaattgatggacctgaccaccctgaacgatgacgacaccaatgaaaaagtgatcgcgctgtgccaccaggccaaaacaccggtagggaatactgccgcagtatgcatctacccgcgctttatcccgatcgcgcgtaaaacgctgaacgagcagggtaccccggatatccggatcgcgacggtgaccaatttcccgcacggtaacgatgatattgctattgcgctggcggaaacccgcgcggcgatagcttacggcgcagacgaagttgacgtcgtattcccttaccgcgcgctgatggccggcaacgaacaggtgggttttgacctggtgaaagcctgtaaagaagcctgcgcggcggcaaacgtgctgctgaaagtgattatcgaaaccggtgagctgaaagaagaagcgctgattcgtaaagcatctgaaatcgccatcaaagccggtgccgattttatcaaaacgtctaccggtaaagttccggtcaatgcgaccccggaaagcgcgcgcatcatgctggaagtcatccgcgatatgggcgttcagcagagcgtcggcttcaaaccggcgggcggcgtgcgtagcgcagaagacgcgcaaaagttcctcgctattgccgatgaactgttcggtgccgactgggccgactctcgtcactaccgctttggcgcttccagcctgctggcaagcctgctgaaagcgctgggtcacggcgatggtaagagcgccagcagctactaatacgtaatttgcctgacctcaaggccggatgctgtccggcctgtggttggtctttgactctttcctcgggaggttatcttgtttctcgcacaagaaattattcgtaaaaaacgtgatggtcatgcgctgagcgatgaagagattcgttttttcatcaacggcatccgcgacaacaccatctcagaagggcagatcgccgcgctggcgatgaccatttttttccacgatatgtctatgccggaacgcgtttcgctgaccatggcgatgcgggattcagggaccgttctcgactggaagagtcttaacctcaatggcccgatcgtcgataaacactctaccggcggcgtaggcgatgtgacctcgctgatgctggggccgatggtcgcggcctgcggcggctatgtcccgatgatctcggggcgcggtctcgggcacaccggcggtacgctcgacaagctggaagcgattcctgggttcgatattttcccggacgatagccgcttccgtgaaatcattaaagatgtcggcgtcgcgattatcgggcagaccagctctctggcaccggcggacaaacgtttttacgccacgcgcgatatcaccgcaacggtggactctatcccgctgatcaccgcctccattctcgccaagaagctggcggaaggcctggacgcgctggtgatggatgtcaaagtcggcagcggcgcctttatgcctacttatgagctttccgccgcgctggccgaagcgatcgtcggggtatccaacggcgccggcgtgcggacgaccgcgctgttaaccgatatgaaccaggtgctggcttccagcgccggtaatgcggtggaagtgcgtgaagccgtgcagttcctcaccggcgagtaccgcaatccgcggctgcttgaggtgacgatggcgctgtgcgtcgagatgctgatttccggcaagctggcgcagaatgacgccgacgcgcgggcgaagctacaggcggtgctggataacggtaaagccgcagaagtcttcggccggatggtggcggcgcaaaaagggccgaacgacttcgtggaaaactacgataagtatctgccggccgcgatgctgagcaaagccgtctatgccgaaggcgaagggtttgtcgccgaaatggacacccgcgcgctgggcatggcggtggtgtcaatgggcggcggtcgccgtcaggcatcggatctgattgattacagcgtcggtttcaccgacgtggttcgcctcggcgcgcgtatcgacgcgcagcagccgctggcggttatccatgctaaagatgaaaacagctggcaggaagcggccaaagccgtgaaagcggccattaaacttgacgataaagcgcctgaaatgacgccgacggtctatcgtcgtatcaccgaatagttatatactgatctgatcgcttttttgcagcgcaaaaggtacggagaataatatgaaacgtgcatttattatggtgctggactcattcggcatcggtgcgactgaagacgccgatcgctttggcgacgtcggttcagacaccatgggccatattgcagaagcctgtgccaaaggcgaggctgacaacggccgcaatggcccgctcaatctaccgaatctgacccgtctggggctggttaaagcccatgagggttctaccggtaaaattgccgccggtatggacggcagcgcggacgttatcggcgcctacgcatgggcgcatgagctctcttccggtaaagacaccccgtcaggccactgggaaatcgccggcgtgccggttctgtttgactggggctacttccccgagcatgaaaacagcttcccgcaggaacttctggataaactggttaagcgcgcaaacctgccgggctacctcggcaactgccactcttccggtaccgttatcctcgaccagctgggcgaagagcatatgaaaaccggcaagccgattttctatacctccgctgactcggtattccagattgcctgtcatgaagagacctttggtctcgataagctgtacgagctgtgtgaaatcgcgcgtgaagagctgaccgaaggcggctacaacatcggtcgcgttatcgcgcgtccgtttatcggcgacaaagccggcaacttccagcgcaccggtaaccgccacgatttggccgttgagccgccggcgccgacggtgctgcagaagctggtcgacgagaaaaagggccaggttgtatcggtgggtaaaatcgccgatatctacgccaactgcggtattaccaaaaaggtgaaggcgaccggcctggatgcgctgtttgacgccaccatcaaagagatgaaagaagcgggagacgagaccatcgtcttcaccaacttcgtggacttcgactcttcctggggccaccgccgcgacgttgcaggctatgccgcagggttggagctgttcgatcgccgtctgccggagctgatggaactggtcggggaagatgacattctgatcctgaccgccgaccacggctgcgacccgacctggaccggtaccgaccatacccgcgagcacattccggtgctgatctatggcccgaaagtgaagccgggttctctgggtcaccgcgaaaccttcgccgatatcggccagaccctggcaacgtacttcggtacgtctccgatggaatacggcaaaaacatgctgtgattatttgcccggtgagcctcgctcgccgggccttttttgtcgacctgattaggcatagccgccatcaggtaaaacattcagaaggatttaacgatggctactccacacattaacgcagaaatgggcgatttcgctgacgttgtgctgatgcctggtgacccgctgcgcgcgaagcacattgcagaaacgttccttgaagatgtccgcgaagtgaataacgtgcgcggtatgctgggcttcaccggtacctacaaaggccgcaaaatttccgtgatgggtcacggcatggggatcccgtcctgctccatttacgcaaaagagctgatcaccgacttcggcgtcaaaaaaatcattcgcgtcggctcctgcggtgccgtgcgtatggacgttaagctgcgcgacgtggttatcggcatgggtgcctgcaccgactctaaagttaaccgtatgcgttttaaggaccacgactttgcggcgattgccgactttggcatggtgcgtaacgcggttgacgcggcaaaagcgctgggcgttgacgctcgcgtgggcaacattttctctgctgacctgttctatgcgccggacggcggcgaaatgttcgacgtgatggaaaaatacggcatcctgggcgtggaaatggaagcggctggcatctacggcgtcgcggcggaatttggtgccaaagcgctgaccatctgcacggtctccgaccacatccgtacccacgagcagaccagctccgctgaacgtcagacgaccttcaacgacatgattaaaatcgcgctggaatccgttctgctgggcgataaagaataatcatctcttcggccctctcccatagggagagggccggggtgaccgcacgttagcgtaccgcgccggcaatccatgccgagagctcccgcagcgctttctcctgctccggaaaatccacgagtaatgcatcgcactcctgctgcagcatatccgcgcggtagaggcatccctgtagcctggcggccagcgcttccagcggcgccgggttgaggctgtcggtaaaaatctgcgtacgcgtgatatggcctttttcgacgtcgaaatggagctctacgccgccccaggtaaaacgttcatccagcagatggctgaaggccggagcctggccaaagttccactcccagctgctctggcgggcaaaggtcgcggcaaaattcggcaggtccggcattttctccggagagatcacttcggcctccacgcgctcgccgtaatgggcgaagaacgcctcctgaatcgcttcgcaaacctgctgatgggtaatgcccggcagcagctcgaccagattggctacccgtccgcgcacggaggtaatgcctttggcctgcagcttcttcttatcgggattgaggtagttggccaggcggcttaaatcggcgttcagcagcagcgtaccgtggtgaaagccgcgatccatcgtttcgcgataggcggaaccggagaccttgcggtcgccttcggcggttttgaccaccagatcgttgcggcccgaggcttccgccgctacgcccagcgcattcagcgccgtcagcacgatatttgtggaaacggttttatcgtactccggtttgccggccataaaggtaaagcaggtattgcccagatcgtggaataccgcgccgccgccgctgctgcgacgggccaggcgcacgttatcttcttccatacgtcgggtgttgcactctttccacgggttctgcgcgcggccaatgaccaccgtatcggcattgcgccacagaaacagcacccgttgagtcgcgggcatctggcgaaaaatagactcctcaaccgccagattgaaccaggggtcgtaagagtcggagagcagcaggcgcagcgtggacatggcgatttccttattctgattcatctttatcttcatcctgcaccggcttattggcggtgagcaggaaaggcgattgctgccagcgggtacgtttaccctgcagcagggtgcgcgtcaggacgacgccgatggccagagatagcagcagcatcagacgcaggatattggtggtattatcgacctgctgagcttcggtggccagggtatgggtatccagcgtcaggcgcaggtagccgagcgggccgtttttaccctgaacaggttcgacgatttgctggttgaagtagccgccggcttttttaccgtccagcgccagccgatcgcgtacctcgacgctttcgccggaacgcgccaccaggtcgccctgttcgtcatatacgccggcgtcgaggatccggcttttatgggtaagctgatccagcagctggctaatccgcttttcgtcgggcgtttcgctacgcatcagcggcgccaggttgagcgtgacctgctgggcgagcgtgcgggccagctcttccagctgcggattgcgctgcttctggctgttctggctgaaccatgaggccccctgcatcagggcgacgaggagcgcgagacagatcagaacaatcaccgcgcgatgcagccggaatttaagttttgcgcgtaccatattccacctttgaaaatttgcagcttaatgttgccagaagcgctggttacaaggtagcctcatgcgttattttcctcgcctgaatgaagttatgtggagccgtgatgccaaacagtttgacctggtgcgacctgcctgaagatgtttcccagtggcctggattgccgctttccctgagcggtgatgaggtcatgccgttggattatcacgccggacgcagcggctggctgctgtatggccgcggtcttaacaagcgtcgcctgaccgagtggcagcgcgaactgggggcggccctggtgattgttgcctcctgggcggttgacgactatcaggtgattcggttggctggttctttaacgctacgggcgacccgtctggcccatgaggccggttttgacgtcgcgccgctgggtaaaatcccgcatttacgtacgccggggctgctggtcatggatatggactcgacggcgattcagattgagtgcattgatgaaatcgccaaactggccggtaccggcgagctggtctctgaagtgaccgagcgcgcgatgcgcggcgaacttgattttaccgccagcctgcgccagcgggtggcgacgctgaaagatgccgatgccaatattctgctgcaggtgcgggaaacgctgccgctgatgccgggcctgacccagctggtgctgaagctggaaacgctcggctggaaagtggcgatcgcctccggcggcttcaccttctttgccgagtatctgcgcgacaagctgcatctcgacgcggtggtcgccaacgaactggagatcatggacggtaagctgaccggcaacgttatcggcgatatcgtcgatgcgaaatacaaagccaatacgctgcgtaaactggcggaaaagtatgagatcccgccggcgcaaaccgtcgccattggcgatggcgcaaacgatctgccgatgattaaagcggcagggctcggcatcgcctatcatgctaagcccaaagttaatgaactggcggaagtgacaatccgccacgctgacctgatgggggtattctgtattctctccggcagcatgaatcaaaagtaagaggttaacgtggcgaaagctccaaaacgcgcatttgtctgtaatgaatgcggtgcggattatccgcgctggcaggggcagtgcagcgcctgtcatgcctggaataccataaccgagatgcgcattgccgcttcgccccaggtggcaagaaacgaacgtctgtcaggatatgccggtaatgccggcgtatcgaaagtgcagaagctctccgatatcagcctcgaagcgctgccgcgcttttcgaccggctttaaagagtttgaccgcgtgctcggcggcggcgtggtgccggggagcgcgattctgatcggcggcaaccccggcgcgggtaagtcgactctgctgctgcaaaccctgtgtaagctcgccgaaggtatgaaaacgctctacgtcaccggggaagagtcgcttcagcaggtggcgatgcgcgctcaccgtttaggcctgccgacggctaacctcaatatgctgtcagaaaccagcattgagcagatttgccagattgccgatgaagaaaagccgcagctgatggttatcgactccatccaggtgatgcatatggccgacgtacagtcgtcgccgggcagcgtggcccaggtgcgcgaaacggcggcctatttaacgcgctttgccaagacgcgcggcgtggctatcgtcatggtcggccacgtgaccaaagacggctcgctggccgggccgaaagtgctggagcactgtatcgactgctccgtgctgctcgacggcgacgccgattctcgtttccgcaccctgcgcagtcataaaaaccgcttcggcgcggtcaacgagctgggcgtattcgccatgaccgagcaggggctacgtgaagtgagcaacccctcggctatctttctgagccgcggtgacgaagtgacttccggcagttcggtgatggtggtctgggaaggcacgcgaccgctgctggtggagatccaggcgctggtcgatcactcgatgatgtccaacccgcgccgcgtggcggtggggctggagcagaaccgtctggcgatcctgctggcggttctgcatcgtcacggcggtctgcagatggccgaccaggacgtcttcgtcaacgtcgttggtggcgtaaaggtcaccgaaaccagcgccgatctggcgctgctgctggcgatggtttccagcctgcgcgaccgtccgctgccccaggacctggtggttttcggcgaagtgggtctggcaggcgagattcgcccggtgccgagcggccaggagcgtatttcagaagcggctaagcatggttttcgtcgggcgattgttccggcagccaatgtgccgaaaaaagtgccggaagggatgcaaatctttggcgtgaaaaagcttgcggacgcacttagcgtctttgacgacttataataagttaaaaggagactcgcgatgtcgtcatttgactatttaaaaagcgccattaagcagaaggggtgtacgctacagcaggtagctgacgccagcgggatgacaaaaggctatctgagccagctgctgaacgcgaaaattaaaagccccagcgcgcagaagctggaagcgctgcaccggtttctcgggctggagtttccgcgtcggcaaaaaagcgttggcgtggtatttggtaagttttacccgctgcataccggacacatctatttgattcagcgcgcctgtagccaggtcgatgagctgcacatcattatgggctacgacgatccccgcgaccgcgagctgtttgaaaagagcgcgatgtcgcagcagccgaccgtgcccgatcgcctgcgctggctgctgcagaccttcaagtaccagaaaaatatccgcatccacgccttcaatgaagaggggatggaaccttatccgcacggctgggacgtctggagccgcgggattcgcgcctttatgaacgagaagggcattgagcctaactggatctacacctcggaagagggcgacgcgccgcagtatctggatcatctgggaattgaaaccgtactcatcgatcctaaacgcacctttatgaacatcagcggcgggcagattcgtgaaaatccgttccgctattgggaatatattcctactgaagtgaagccgtttttcgtgcgcacggtggcgatcctgggcggtgaatcgagcggtaagtcgacgctggtgaataagctatccaatatctttaataccaccagcgcctgggagtatggccgcgactacgtcttttcgcacctcggcggcgatgagatggcgctgcaatattccgactacgacaagattgccctcggccacgcgcagtatattgatttcgcggtgaagtatgccaacaaggtggcgttcatcgacacggactttgtcagcacccaggcgttctgtctcaagtacgaagggcgggaacatccctttgtgcaggcgctgatcgacgagtatcgttttgacctggtcatcctgctggaaaacaacacgccgtgggtggccgatggtttgcgtagccttggcagctcggtggaccgcaaagagtttcagacgctgctggtgtcgttgcttaaggaaaacgagatagattttgtgcatgtaaaagaggccgactacgatgcccgcttcctgcgctgcgtggagctggtgaaagagatgatgggcgagcagggataggccttctgcggcctgatgccgcataaatgcctgcggcgggctacaaccctctcccagcgggggagggggcaaacacgaaaaagggcaacctgcgttgcccttttgcttttatttcgcgatacgtttgtacttaatacgcttcggctccagcgcatcggcgccgagggtgcgtttcttgtactcttcgtattcggtaaagttaccttcgaagaactccaccttaccttcatcctggtagtccagaatgtgggtcgcgatgcggtcgaggaaccagcggtcgtgcgagataaccatcgcacagcccgggaactccagcagggcgttttccagcgcgcgcagggtttcgatatccaggtcgttggtgggctcatcgagcagcaggacgttaccgcccacctgcagcagcttcgccaggtgcagacgaccgcgctcaccgccggacagctcgccaacgcgcttgccctggtcaacgcctttgaagttaaagcggcccacgtaggcgcggctcggcatctcggtgttgccaatcttcatgatatccagcccgccggaaacttcttcccatacggttttgctgttgtccatcgcgtcgcggaactgatcgacggaggccagcttgacggtttcacccagggtgattgaaccggcatcaggctgttcctgaccggacatcatgcggaacagggtggatttacccgcgccgttcgggccgatgatgccgacgatagcgcctttcggtaccgagaagctcaggtcgtcgatcagcagacggtcgccgtaggacttacgcaggttgctgacttccacgactttatcccccagacgtgcgcctggcggaataaacagttcgttagtctcgttgcgcttctggtactcgacgttgttaagctcttcaaagcgcgccagacgggctttgcccttagactgacggcctttcgcgccctgacggacccactccagctctttctcgattgacttacggcgcgccgcttcctgagaagcttcctgcgccagacgctgatctttctgctccagccaggaggagtagttgccttcccacggaataccttcgccgcggtcaagctcaaggatccagccggcgacgttatcgaggaagtagcggtcgtgggtaattgccacgacggtgccttcgaaatcgtgcaggaagcgttccagccacgcgacggactctgcatccaggtggttagtcggttcgtcgagcagcagcatgtctggtttttccagcagcaggcggcacagcgcgacgcggcggcgctcaccgccggacaggttggcgattttcgcgtcccagtccggcagacgcagggcatccgccgcgcgctcaagctggacgttcaggttatggccatcgtgcgcctggataatctcttcgaacttgccctgctgagcggcgagcttgtcgaagtcggcatccggctccgcgtatttggcgtacacctcgtccagacctttcagggcgttgaccacttcggccaccgcttcttcaaccgactcacggacggtctgctccggattgagctgcggctcctgcggcagatagccgattttcaggcccggctgcggacgggcttcgccttcgatatcggtatcgatgccggccatgatgcgcagcagggtagacttaccggcgccgttcagaccgagaacgccgatttttgcgccagggaaaaagctcagggagatatttttcagaatatgacgtttcggcggaaccactttgccgacacgatgcatggtataaacgaattgagccacgttggacttcgcctcttttatatactcttcatccctcaggctcgcttgatgcagccagaatgattttgagtagggtagtgaatagttttcaaaggcgaagtgtagcctttttcgcgctttaatcccagcgaggcgatgggattcacaaaagcgtaaaaaaatgtccgggacgtggcgcgattcgcgttgtctgattagcatatctacgtaatacctgaaatttttgcccgcggcatgatgctgctgtggtgtatctgaatagaggaagagcttgtggaaaaagccaaaactgtgacgtggcgtcttctggccgccggcgtaagtctgctgacgttaagccaactggcgcatgcggattcactggatgaacagcgcagccgctatgctcaaattaaacaggcgtgggacagtcgacaaatggacgtcgtcaaccagctgatgcccaccctgacgacctatccgctctatccttatctccagtaccggcagattaccgacgatctgatgaaccagccggcgctggtggtgaccaactttatcgctgccaacccgacgctgccccccgcgcgctcgctgaaatcacggttcgtcaatgaactggcgcgccgtagcgactggcgcggcctgctggccttcagtccggataagccgaccggcaccgaggcgcagtgcaattactactatgcgaagtggaacgtcggccaggctcaggaggcctgggacggcgccaaagcgctgtggctgagcggcaaaagtcagccaaacgcctgtgaccagctgtttggcgcctggcgcgcctccggccagcaggatccgctggcctaccttgaacgcattcgcctggcgatgaaagcgggcaataccagcctggtgcgggtcctggcccagcagatgcctgccgattatcaaacgatttcgacggcggtcatcgcgctggctaacgatcccaacagcgtgatgacgttcgcccggacaaccggcgcgacggattttacccgccagatggcggcggtcgcgtttgccagcgttgcgcggcaggatgtggaaaatgcgcgcctgatgatcccctcattagcgcaggcgcagcagctcaatgaagatcagattcaggagctgcgggacatcgtcgcctggcgcctgatgggcagcgacgtgaccgaagagcaggccatctggcgcgacgatgccattatgcgttcgcaatccacctcgctggtggagcgccgggtacgtatggcgctgggtcttggggaccgccggggcctgaacacctggctggcgcgcttgccgatggaggcgaaagagaaggacgaatggcgctactggcaggccgatctgctgctggagcgcgggcgcgatgacgaagcgaaagatattctccgctcgctgatgcagcagcgcggcttctatccgatggtcgccgcgcagcgccttggcgaggagtacaggttccgcatcgataaagcgccagcgaacctcgatccggcgctgacctcggggccggaaatggcgcgggtgcgcgaactgatgtactggaatatggataacaccgcccgcagcgagtgggccaatctggtcaccagcaagaccaaagaccagcaggcgcagctggctcgttacgcgtttaatcagaactggtgggatctcagcgtccaggccaccatcgccggcaaattgtgggatcagctggaagagcgtttcccgctggcctataacgacctctttacccgctatatcagcggtaaagatattccgcaaagctacgcgatggccattgcgcgtcaggagagcgcctggaacccgaaagccggttcaccggttggcgcccgcggtctgatgcagattatgccggggacggcaacgcatacggtgagcatgttcagtattcccggctatagcggtccatcgcagctgctcgatccggaaatgaacatcaacattggtaccagctatctgcagtatgtttatcagcagtttggcaataaccgtatcttcgcctccgcggcctataacgccggtcccgggcgggtgcgcacgtggcggggcaacagcggcggccgcattgacgcggtggcgtttattgagagcattccgttctctgaaacgcgcggctacgtgaaaaacgttttgtcctatgacgcctactatcgctattttatgggccagaaagagacgctgctgagcgatgcggagtggaagctgcgctattaatatcgccgtcgtcgggcaacatcgtatttcgcgatgttgcccgaaatccgtagagtccggacagaagtatgttatgctttgtactcgttagtgagtacattcgacaggtggcgtaacatgacccaacaatccccctattcagcggcggtggccgaacagcgtcatcaggagtggctgcgttttgttgctctcctgcagcaggcgtacgccgacgatctccatctgccgcttttacagctcatgctgacgcccgacgagcgcgaggcgctgggcacgcgggtgcgtattattgaagagctgctgcgcggcgagatgagccagcgcgagctgaaaaacgagctcggcgccgggatcgccaccattacccgcggttcgaacagcctgaagtcagccccgccggagctgcgtctgtggctggagcaggcgttgattaacgttaacgataaatagcgttatgaaacgggcttagcgccagcacgacggcctgatgataaacgctgctgcgcgtcagttttccggccgtaaatacgccgatagcgccctctttacggccaatttcatcgatgccggtatactgagacatcaccggccccagcgcttctcctgcctggactttttcaagaatgacctgcggcagcggcagggtcgccgagcgcgcttcgccgcgcaggctgccgtcctcgatcgtcacccagctaaaggtgctgccctcatcgatgccggcttcaatagcgacccagaagtcagcattgggctgcgcgcgacgcgcgttggccacgcggtttcgtgcgccagcgcgcgtttcgttgctgccaaaaggctgttccggcacgccgctctcgacggagacggactcaatgtggcaggatccttcgccgaagatctcgttaaaagcctgcagaattgcctgaattttggcgggattagtggtagctgagacaacatggtgcataatcaaaacaactcagaaatactaaacatcatcgcagtatactccaaatcattcttgttgcaggcggctatgcttgtagcttaatggttaagagctcataacggataataaagcatgttacaggtataccttgttcgccacggtgaaacgcagtggaacgccgagcgacgtattcagggccagtccgacagtccgcttaccgcccacggtgagcgtcaggcctggcaggtaggcgagcgcgccagaacgctggggattacgcatattatcgccagcgatttaggccggacgcggcgtaccgcagaaatcatcgctgaagcctgcggatgcagcgtcatgaccgattcacgcttgcgtgagctggatatgggcgtgctggaaaagcgccatatcgactcgctgagcgaagaagaagagggctggcgtcgacagctggttaatggtacgcccgacgggcgcatcccgcagggagagtcaatgcaggagctgagcgaccgtatgcacgcggcgctgacctcttgtctggagctgcccgcaggtagccggccgctgctggtgagccacggcatggcgctggggtgtctggtgagtacgattcttggcttgcccgcctatgcggagcgtcgcctgcgtctgcgcaactgctctatctctcgcgttgactatcagcaaagcccctggctggcgtcgggatgggtcgtggaaaccgcgggggatgtctcgcatcttgatgcccccgcgatggatgagctacagcgttaacgacgaatcggaatcaggtattcgcagcgcagctgaataggcggttcctgattccggttttcatcttccgggaagaagcgttcgatatccaggcccttacgacgagtgagattgagcatcggcatgcaggtgccgtaaaccgtcagaataaattcctgtagcccggtgcccaatccttcgtaggtaaacatcacgtattcgccgccttccagcgtcaccgggtgggcgttgtgcagatggccgttagccagctccggcgtcagcgcggtggtgtaaaacacctcctgctcatcgtctttatcgaggctcggacgcggctcatgcaggccgtacagcgtcggaggaatcgatggcgtattggcgaggaattcacgccagaactgcacgcgcatctgattacggaaatcggagatctcttccagcttgcaggtatagctctgggtcacgccgaccagctgagtggtgttcagcgtgacgaattcgtactgcggcatggtgaactcgcccagacgcagcggaggacgcataccgtaagagctccagtcgggggagcgtcggtaaagggctggcgtcaacgagaactgttttttaaatgcgcgagtaaaagtctgctgcgagtcaaagcgatactgcagcgcaatatcgagaattggacgcgcggtcaggcgtagggcaaccgctgacttagataagcgacgggcgcgaatataggcaccaatggcatggccggtcacgtccttgaacattctttgcagatgccacttggaatagcccgccttcgctgccacattgtccagtgagagtggctgatccaggtgaccttccagccagctaaggagatcgcgaataatccctgcttgatccataaaatatccccatccttaaactcaggtgcctgatactaaaggtagcggataatagcattttttgatgttttagcattcagtgttttttttgcttttaaatgcgattcttccagaagtatcggtggtaattttgtaaagctgtgatctataaaacttttctgcttaatgtgtgataatcactcagctaaatttttaagaatggtaacaatatgaaatacaagaagttagtggcaggtatgcttttactggcggggtctcagatggcgcaggcggagcaaattggctctgtggataccgtgtttaagttccttgggccggatcataaaattgtcgtagaggcctttgacgacccggatgtacaaaacgtgacgtgctacatcagccgggcgaaaaccgggggaattaaaggcgggttagggctggcggaagatacctctgatgctgcgatctcctgtcagcaggtggggccgattgagctgacggataaaatcaaaaacggtaaaacgcagggcgatgtcgtgttccagaaacgcacctcgctggtatttaaaaagctgcaggtggtgcgcttttacgatgccaaacgcaatgcgctggtctatctgacctattcggataaaatcgtcgatggctcgccgaagaacgcgattagcgcggtgccgattatgccatggaataaataacagggaacgccgatgcaacaaccgcggatctggttggtggaagatgagatgagcatcgccgatacgctcgtctaccagctgcagcaggaaggatttctcgttacggcgttcgagcgcggactgccggcgctcgatgcggcacatcaccaccaacccgacctggcgattctcgacgtcgggctgccggatatcagcgggtttgagctctgtcggcggctgcttgcccgctacccggcgctgccggtgctgttcctgacggcccgcagcgaagaggtggataagctgcttggcctggaaatcggcgctgatgactatattgccaagccattttcccctcgtgaagtttgcgccagagttcgcaccgttctgcggcggctgcagaagttcgccgcccctccaccgctcttgcgcgtgggggagttcacattgaacgacgccgcggctcgggtcacctggtgcggtcagagcctgaatctgacccgctatgagtttttattattaaaaacgctactgcactctccggggcgcattttttcccgccagcagctgatggagcaggtatggggcgatgcgaacgagagcttcgatcgtaccgtggatactcatatcaaaacgctgcgcgctaagctgcgagaagtgaaccctgacatctcccccatcaatacgcaccgcggcatgggatacagccttggaggcttctgatgcgcatcggtatgcggctgctgatgggctactttttgattgtggcgatcgcggcctggtttgtgctttccatcttcgttcaggagattaaacccggggtccggcgggcaaccgaagggacgctgattgatacggctaccctgcttgccgagctggcccgcgaggatttactctccgccgatccccagcacgggcgcctggcccaggcttttcaaacgctgcatcgccagccgatcaacgccaacattgccggcattaataaagttcgcaatgaatatcacgtctatatgaccgatgcgcagggcaaggtggtgtttgattctgcgggcagtgcgctggggcaagactactcgcgctggaacgatgtctggctcactttacgcgggcaatacggcgcgcgcagcacgcgcagcgatccgaacgatgataacagctcggtgatgtatattgccgcgccggtgactgacagcggccgaatcattggcgtgctaagcgtcgggaaacccaacctggccatggcgccggtcattaaacgcagcgagcggcgtattctgtgggccggcggggcgctgctggggatcgcgctcctgataggcgctgcgatggtatggtggattaacttttccatcggcaagctggttcgctacgcggactccgtgaccgccgatcgtccggttccgctgccgaatctgggcggcagcgaactgcgtaagctggcgcaggcgctggagagtatgcgccttaagcttgaaggtaaaaacgccattgaaaactatatttatgcgctgacccatgagctgaagagcccgctggcggcgattcgcggcgcggcagaaattctccgtgaggctcctccgcctgaggtcgcagcccgttttacgcgtaatattctggcgcagaacgcgcgaatgcagtcgctggtggaaaatttgctccagcaggcccggctggagaaccggctggagatcgcccgacgtcccgtccccgtcgctgagctatttcatcgcctggccgaggagcgcgagatcgcgctggcggcgaaaaaagtgacgctgcgctggcaggatacacctctgatggttgaaggcgatcgggagcttctggcgcaggcgttgggtaatctccttgataatgctatcgatttcacgccttccgcaggtgaaatcctgcttggggcggaagagcgtgatggcggcgtgctgttaaccgtatgcgatacgggatgcggcattcccgactacgccctggggcgtatttttgaacgtttctattccctgcctcgtgaaaatgggcaaaaaagcagtggcctggggctggcgtttgttcgtgaagtcgcgcgcctgcatcagggggatatccagctggttaaccgccctgaaggcggcgcgtgcgctttgctgacacttcacgctcacttcacatagcttcaaactctccccacacggcccctttaaggtgagcgcatcactaaggagagggctatgttgaaatcaccactattctggaaaatgagcaccctgctggggtgcattttactgttgtcgatcccgctgatgctggtccggcagctgatcgttgaacgcgcggactatcgtagcgacgtggttgacgcgctggagagcagcaccagcggatcgcagaaactggccggaccgctgattgccattccggtaaccgagacgctaacgcgggttgagggaactaaaacggtagaatatcaaacccaatgggtacactactggctgccggagacgctggcggtcaccggtaatcaggatgttgaatcacggcgaatcggtatctatgaggggcagatctggcacaataatctcagcgtcaaagcgcattttgatccttcgcgcatcaaggcgctcaggaagcagacgattacgctgggcagaccgtttctggttgtcagcgtcagcgatgcgcgcggtattggcgagattaagtcaccagagctcaatggcgagaggctacccgttgagcctgggccgggtctcgacgatagcggggagggcattcatatgccgatgccgctgttactccctgaacaaaaagcgctggatattgaattcacgctcaatctgaatggcagcggcagcttctcggtggttccgcttgggcgcaacagtaccttacagcttgccggcaactggccgcacccgggtttccttggcgactttttacctgcaaagcgggaagtcagcccaacaggctatagcgcccagtggcaaagcacctggtttgccaacaatatggcgaagttttttgttgagggtcggcagattgagtggcgtcagttgcccgctttcaacgtgaatgtcaccacgcccgccgatcaatatcagctgaccgatcgggcgacaaaatatgccgttctgttgataacgctgacgtttatggcattttttgtttttgaaagcttaacgcggtatcgcatgcaccccatgcagtatctgctggtggggctgtcgctggtcatgttctatctggtgctgctggcgctgtccgaacatatcggttttacagcatcgtggattgccgccagcctgctaggcgcgctcatcaacggggtgtatcttcaggcagtattgaatggttggcgtaacagtttactgttcgtctgcgcgctactgctgctggacggcgttatgtggatgctgttgcgatcggaagatagcgcattgctgctggggaccggcgtattgctgctggcgttaagtgcgctgatgttcctgacccgccacgttgactggtacgcgttatctctgccgaaggcaaaaggtgagctgccggacgctggtcaggatgacgataagctcaggatctggaaataaaaaaacggcgcgaattgcgccgtttttacgttatgacagcaagaaaaatggtgttattcctgcaggtcgccacagaagcggtacccctcgccatggatggtggcgataatttccggggtgtccggagtggattcaaaatgcttacgaatgcgacggatggtcacgtccacggtacggtcgtgcggcttcagctcacggccggtcattttcttcagcagttccgcacgcgactggattttgcccggattttcgcagaagtgcagcatggcgcggaattcactgcgcggcagcttgtactgctcaccattggggcttaccagcgagcggctattgatatccagctcccagccgttgaacttgtagctttccacgctacggcgctcttcgctcacggtacccaggttcatggtacgggagagcaggttgcgcgcgcggatcgtcagttcacgtgggttgaacggtttagtgatataatcatcggcgccaatttcgaggccaaggattttatccacttcgttatcgcggccggtgaggaacatcagcgcgacgtccgcctgctcacgcagttcgcgtgctaacaggagaccatttttacccggcaggttgatatccatgatcaccaggttgatatcattttcagacaggatctgatgcatttccgcgccatcggtcgcttcgaatacatcataaccttctgcttcgaaaatactttttaacgtgttgcgtgttaccaactcgtcttcaacgataagaatgtgcggggtctgcatgtttgctacctaaattgccaactaaatcgaaacaggaagtaccaaagtccctgacctgcctggtgcatgtcgcaaattaacatgcccggcgtaacatgactaaagtacgtaattgcgttcttgatgcactttccatcaacgtcaacaacatcattagcttggtcgtgggtactttccctctggacccgacggtgtcaaaaacggctgtcatcctaaccattttaacagcaacataacaggctaagtgaggcatgacacccaataaaactacgcttcgttgacatatatcaagttcaattgtagcacgttaacagtcttgtgaaatcattgcatctaaacgggattcatcttcacaattcatacttcgctcaattagttgcaatgagaaaataataaacgcggtgaatccaaagcctcaaaacgtactcggacgtaaatttcattgccaaacatacggataaagccgttctgttaacatactctgtgtcatggtgccttgggaatagtttagttttttttatgggtgataaagctcaaatttagtgatttttgttgcaaatttgtaaattcacggcgcgtaaaatgagggaaaaaatcgttattcccaccgcctaaaaggtaaaagagaaaccgaatgcgtttatcaattgtattagtgtccccggctcgggcggaaaacgtcggggcggcagccagagcgatgaaaaccatggggtttagcgacatgcgtatcgtcgatagcgaggcgcatttgcagcccgccgcgcgctgggtcgcgcacggttctggcgatatcctcgataatatcaacacttatgccacgctggagcaggcgctgcacgatgttgattttaccgtggccacgaccgcccgcagccgggcgcgtttccactactacgcgacgccgcagcagctcctgccgctgctggaagaaaaagcgcagtggatgcatcatgccgcgctggtgtttggtcgggaagattctggtctgacgaatgaagagctggcccttgccgatgtgttgaccggtgtgccgatggcggctgactatccttcgctaaacctggggcagtcggtgatggtctattgctaccagctgacctcattgctgcagcgggccccgtcaacctccgccgacgcagatgataatcagctgcaggcgttacgcctgcgaacgcgcgctctgcttaaccgcctcggcgcgggtgacgatgtaaaactgtccgactggctggagcagcggataggacttttgcagcagcgagacaccgccatgctgcatcgtttactgcacgatattgaaaaaaacctcccagggtaaaatgctgtcatattattttcatatggtcttatgtgctaattatttgcgtctggatgcgtaaatgcggatgaattgtcaggttgctatggcgtattggccaggtgtgaaaaaaagggctaaaagtagaaattcgttgacttaagtcgacagatactttaaccaatataggcacaggacacagacagataaaaattacagagtacacaacatccatgaatcgcatcggcatgatcaccacgattatcaccaccactattaccacaggtaacggtgcgggctgacgcgtacaggaaacacagaaaaaagcccgcacctgaacagtgcgggcttttttttcgataaaaaatcaaggggtcataaccatgcgtgtgttgaagttcggcggtacatcagtggcaaatgcagaacgttttctgcgtgttgccgatattctggagagtaatgccaggcaggggcaggtagcgaccgtactgtctgccccggcgaagatcactaaccatctggttgcgatgatcgaaaaaaccattggcgggcaggatgcgctgaccaatatcgctgatgccgaacgcattttcgccgaacttctgcaaggcctcgccgatgcccagccgggctttccgcacgctcagttgaaaatgtttgtcgagcaggagtttgcgcaaatcaaacacgtcctgcacggtattagcctgctcggacagtgcccggatagcgtcaatgcgtctctgatctgccggggagaaaagctctccatcgctattatggccggcttactggaagcgcgcggtcataacgtcacggtgattaatccggttgaaaaactgcttgccgttggccattacctcgaatccaccgtggatatcgccgagtcgacccgccgcattgccgccagccagatcccggctgaccatatggtgctgatggcgggctttaccgccggtaacgaaaagggcgaactggtggtgctgggccgtaacggctctgactactccgcagcggtgctggccgcctgcctgcgcgccgactgctgtgaaatctggaccgacgttgacggcgtttatacctgcgacccgcgtcaggtgccggatgcgcgtttgctgaagtcgatgtcctatcaggaagcgatggagctctcctacttcggcgctaaagttttgcacccgcgtactatagcccccatcgcccagttccagatcccctgtttaatcaaaaataccggtaatccgcaggcgccgggtacgcttatcggcggcagcagcgatgaagacgatctgccggtgaaaggtatctctaatctcaacaatatggcgatgttcaacgtctccgggccggggatgaaggggatggttggcatggcggcgcgcgtgttcgccactatgtcccgcgcgggaatctccgttgttcttatcacccagtcctcttccgaatacagcatcagcttctgcgtgccgcagagcgattgcgctcgggcgaagcgggtaatggaagatgaattttatctggagctgaaagaggggctgcttgagccgctgtcgatcatggaacgtctggcgattatttcggttgtcggcgatggtatgcgcaccctgcgtgggatttccgctaaattcttcgctgcgctggcgcgcgccaatatcaacattgtggcgattgcccagggttcttccgagcgctctatctccgttgtcgtgagcaacgatgatgctaccaccggcgttcgcgtgacccaccagatgctgttcaataccgatcaggtgattgaagtgtttgtcattggcatcggcggcgtcggcggcgcgctgatcgaacagatcaagcgccagcagagctggttgaagagtaaacatatcgacctccgcgtttgcggggtggctaactcgcgcgccttgctgaccaacgtacacggcctgaaccttgaacactggcgcgatgagctggcggaagccaaagaggcgttcaacctgggacgacttattcgtctggtgaaagagtaccatctgctgaacccggtgattgtcgactgtacctccagccaggcggtggccgatcagtacgccgatttcctgcgcgaaggtttccacgtggtgacgccgaacaaaaaggccaatacctcatcgctggattactatcatcagctgcgtcatgccgcgagcagctcacgacgtaagtttttatacgatactaacgtcggcgcggggctgccggtaatcgaaaacctgcaaaatttgctgaacgccggtgatgagctgctgcgcttctccggtattctgtccggctcgctgtcatttatcttcggtaagctggacgaaggcgtaagcttctccgcggcgacgaagctggcgcgtgaaatgggctataccgaaccggatccgcgcgacgatctttccggcgtggatgtcgcgcgtaagctgctaatcctcgcgcgtgaaaccgggcgtgaactggagctgtctgacattatcgtagagccggcgctaccggcgggttttgacgccagcggcgatgtcgacagctttatggcacgcctgccttctctggatgacgagtttgcctcgcgggtctcaaaagcgcgcgatgaaggtaaggtcttgcgctatgtcggaaatatcgaagaggatggcacctgccgcgtgaaaatcgccgcggttgatggcaacgatccgctgtttaaagtgaaaaacggcgagaatgcgctggcgttctacagccactattaccagccgctgccgctggtgctgcgcggttatggtgcgggtaacgatgtgacggcagctggcgttttcgccgacctgctgcgtaccctgtcatggaagttaggagtttaagatggtcaaagtatatgccccggcttccagtgctaatatgagcgtcgggtttgacgtgctgggcgcggcggtaacgccggttgacggcacgctgctgggggacaatgtctcggttgaggcggcgacgagctttagcctgcaaaacgtgggtcgcttcgccagcaaactgccgacggcgccgcaggaaaatatcgtctatcaatgctgggagcgtttttgccaggagattggcaagacggtaccggtggcgatgaccctggaaaaaaacatgccgattggttccggcctgggctccagcgcctgttccgtcgtcgccgcgctggtcgcgatgaacgagttctgcggcaaaccgctcaatgagagccgaatgctggcgctgatgggcgagatggaagggcggatttccggcagtatccattacgataacgtcgcgccgtgctatctgggcgggatacaattgatgcttgaggaaaatggcatcatcagccagcagattccggccttcgacgagtggctgtgggtgctggcctatccgggtattaaggtctccaccgcggaagcgcgggcaattttgccggcgcagtatcgccgtcaggactgtattgcccacggtcgtcatctggcgggctttattcacgcctgctattcccgccagcctcagctggcggcgaaattgatgaaagatgtgattgccgaaccgtatcgtaccaaactactgccgggcttcagcgcagcgcgtcaggcagcaatggaaattggcgcgcaggcgtgcggcatttccggttccggtccaacgttgtttgcattatgcgataaaccggaaaccgcgcagcgcgtcgccgactggctggctacgcactatctgcaaaatcaggaaggcttcgttcatatttgccggctggacacggcgggcgctcgagtagtgggataaccaatgaaactctataacttaaaagatcataacgaacaggtcagctttgcgcaggccgtcacgcaggggcttggcaagcatcaggggctgttcttcccgcacgatctgccggaattcagcctgactgaaatcgacgagatgctgcagcaggactttgtgtcgcgtagcgcaaaaatcctgtcggcatttatcggcgatgagattccgcagggcgttctgcaagagcgcatcggcaatgcctttaccttcccggctccggtcagcaaagtgcaggacgacgtcggctgcctcgaactgttccacggcccgactctggcgtttaaagacttcggcggccgctttatggcgcagatgctcacccatatcgcaggcgacaaaccggtcactattctgacggccacctccggcgacaccggcgcggcggttgcgcacgcgttttatggcctgccaaacgtcaaagtggtcattctctatccgcgcggcaaaatcagcccgctgcaggaaaagctgttctgcaccctcggcggcaacattgaaactgtggcaatcgacggcgactttgacgcctgccaggcgctggttaaacaggcctttgatgatgaagagctgaaagctgcgctgggtcttaactcggctaactcaatcaatatcagccgcctgctggcgcagatttgctattactttgaagccgtggctcagctgcctcaggaagcccgtaaccagctggttatctcggtacccagcggtaactttggcgatctgaccgccggcctgctggccaaatctctgggtctgccaatcaaacgctttattgcggcgactaacgctaacgacaccgtgccgcgcttcctgcaggacggtaactggtcgccgaaagcaacccaggccacgctgtctaacgccatggacgtcagccagccgaacaactggccgcgcgtggaagagctgttccgtcgtaaaatctggcgcctgaacgagctgggctacgcggcggtggatgatgaaaccaccaaagagaccatgcgtgagctgaaggctatcggctatacctcagaaccgcatgcggcgattgcttatcgcgcgctgcgcgaccagctgcaggcgggcgagtacggcctgttcctcggcacggctcatccggcgaagtttaaagagagcgtggaagagattctgcaagagacgctgccgctgccgaaagagctggccgatcgcgccgatctgccgctgctgtcgcataatctgccggccgattttgccgcgctgcgtaagctgatgatgggctaagtctgaatcagcgcttccctgctgcgtgattggcggcagggaagcggtttttttactgctcgtggcgtttaaagaccagctctccgttgcccgaagcgtcggcgtcaaagaaataaccttcgctatcaaagcgggtcagctgctccggcttcgttaagcgattctcaatgatgtaacgactcatcaagccgcgcgcttttttagcgtagaagctgatcactttaaacttgccgtttttctcatcaaggaataccggcttaatcagctggccctcaagccgtttgggtttcaccgacctgaagtactcatcagaggccagatttaccacaatatcgtcgccctgggctttcaacgcctgattcagcttatcggtaataacgtctccccaatactgatacagatctttgcctttcgcgttctcaagcttaatccccatctccagacgatagggctgcatcagatccagcgggcgcagaacgccgtacaggccggaaagcatccgcagatgctgctgggcaaaatcgaaatcggcttcgctaaaggtctctgcccgcaggccggtatagacatcgcccttaaacgccaggattgcctgacgggcgttgtccggggtgaaatctggctgccagtcgtgaaagcgggtcgcgttcaggtcagccagcttgtcgctgatgcccatcagtttaccaatctgcggtgccgacagctgacgggcaatgccgataagctcctgagagtgttccagtagctctggctgggtataacgcgtcgttgccagcgggctttgataatcgagcgtttttgcaggtgaaatcagaatgagcatatccagtccttacaggaaatttttgacgactttagcaaaaaaacgtcatgagaggatcgatagctgcgattgccgcgctattcgcgcggcaggttgtcccatgttcccggtaccagctgctgatgaatttcagggtagcgggtgacgtcaaattccggccgctggcccagcttccgctgtcgcagataatcgctggcaatgatgcgcaccgtcggcgacagcagcaggatagccgtcaggttagttatcgccatcagcgccatgatgatatccgccatctgccagaccaccggtaggctgaccatcgcgccggtggcgaccatacacagcgtaagcagacgcagcagccagatgttacgcaggctatccatgcggagaaaaatgagattattttcggcatagatatagtttgcgacgatcgaactgaaggcgaacagcagcacgataaaagcgacaaagctggaaccccagtcgccgacgaggttgctcatcgaatgctggatggcctgaatgccatttgccgcttcttcgttgccgtctcgcggcgccagcatgatgatcacggcgctggcggtacagatcacgatggtatcaataaagacgccaatcatttgtacgatcccctgcgccgcgggatgagggggccaggaggcggcagcggcggcggaatttggcgtcgaacccatacccgcttcattggaaaacatcccgcgctgaaagccgctggtgagcgcctggctgatggtgtagcccaccgcgcccgcagcggcctcttgccagccgaaagcgcagcggaaaatgatttcaaaaatcgtcggcagggcggtgatatgccacaggccgataatcaggctggtcagcacccacagtaaagccataagcggcacgagccactgcatcagccgcgctacgccgcgaatcccgcgaacgatgaccagcagggtcagcgccgccagcacgacgccggtgataacatcgggtaaacgaaacgcatactccatggcatgggcaacggagttggcttgtacggtattaaagatgacgccgtaggccagcaggagaagaatggaaaacagcacgcccatccagcgcatgccgagtccccgggccatataccaggccgggccaccgcgaaagtgcccgcgggagtcgcgctctttataaagctgcgcgagagaacattcggcgaaactgctggccatgccgagcagcgccgagacccacatccagaaaacggcgccagggccacctgcggcaatggccagcgccacgcctgccatattgccgctgcccacgcgcgccgccaggctcatacagagcgcctgaaaagaggttaacccgccgggctgcggctgaaggctctttttcagacttctgctaaactggcggatataacggaactgtataaattttgttcgccaggtaaaccagacgccagcgcccagtaacagataaatcattaccgagccccagagtatttcattgataaacgacagaaaatcaggcatcaagcatcctcttgcccatatcggtgcgcgagtgtaagcgctaccaatccagtgacaatcctttagtgttcagggaattaattggcccagtttatcacactctgcgctcatgcattgtaggcggttgcgctgccccggcagcgtgttatcatcttggcagaccggttacatccccttaactgctgtttaagagaaacactatcatgacggataaattgacttctctgcgtcagtacaccactgtcgtagctgataccggagatatcgcggcaatgaagctgtatcagcctcaggacgccacgactaacccttctttgattctcggcgcggctcagatccctgagtaccgtaagctgattgatgacgccgttgcgtgggctcgcggccagagcagcgaccgcgcgcagcagattatcgatgcttccgataagctggcggtgaacattggtctcgaaattcttaagctgatccctggccgtatttccaccgaagttgatgctcgcctgtcctatgacaccgaggcttctatcgccaaagctaagcgcctcatcaaactgtacaacgatgctggcatcggcaacgatcgcattctgattaaactggcttctacctggcagggcattcgcgccgctgagcagctggaaaaagaaggcatcaactgtaacctgacgctgctgttctccttcgctcaggcgcgtgcctgtgcagaagcgggcgtattcctgatttctccgttcgttggccgtattctcgactggtacaaagccaacaccgataagaaagagtacgcgccggcagaagatccgggcgtggtgtccgtaagcgaaatctacgaatactacaaacagcacggttacgaaacggtggttatgggcgcaagcttccgtaacctcggcgagatcctcgaactggccggctgtgaccgcctgactatcgctcctgcgctgctgaaagagctggcggaaagcgaaggcgccatcgaacgcaaactggccttcagcggcgaagttaaagcgcgtccggcgcgtatcaccgaatctgaattcctgtggcagcacaaccaggatccgatggcggtagataaactggcggaaggtatccgcaagtttgcgatcgaccaggaaaaactggaaaaaatgatcggcgatctgctgtaataccccatgtggccggcgcccgtcggccacattaaactgtctgccttgctcccctcggtgtattattctgtctattaatactgtttgaacggaataatcatgaacaccttacgaatcggcttagtttccatttccgatcgcgcctccagcggcgtctatcaggataaaggcattcccgcgcttgaagcgtggctggcccgtgcgctctccacgcctttcgaattgcaaacccgcttgatcccggatgaacaggttattatcgagcaaaccctctgtgaactggtcgatgaaatgggctgccacctggtcctgacgaccggcggcacgggcccggcccgccgtgatgtcaccccggatgcgacgctggcgattgccgatcgggtgatgcccggctttggtgagcaaatgcgccaggtgagcctgcactttgtgccgacggccattctgtctcgtcaggttggcgttatccgcaagcaggcgctgatccttaacctgcccgggcagccaaaggcgattgaggaaacgctggaaggcgtgaaagatgcggaaggtaacgtgctggtgcacggcgttttcgcgagtgtaccgtattgtgtacagctgcttgaggggccttatgtggaaacaaacggcgaagtagtagcagctttccgtcctaaaagcgccaggcgtgaaacattatcctgaatttaccgtattcctgatataacctgcatcaccagtggtgtgttgttttatttacgatatagtgttttttactttacaccgtgcgtagaatatcttcatacctctggatgattgcccgttatgtcacactacacccgacctctgaatcgacaggattataaaacgctgacgctggccgccctcggcggcgcgctggagttttacgatttcattatctttgtcttcttcgccgccgttgtcggcgagctatttttcccggccgatattccggaatggctgcgccaggtgcagaccttcggcatttttgcggcgggctatttagctcgtcctcttggcggcatcattatggcccattttggcgatctggtcgggcgtaagaagatgtttaccctgagtattttactgatggcgctgcctacgctggcgattggcctgctgcccacctacgcgtcggtaggcatcgtggcgccgcttttgctgctgcttatgcgcattctgcaaggggcggcgattggcggtgaagtccccggcgcctgggtctttgtggcggagcatgtaccggaaaaaagaataggtatcgcctgcggtacgctgaccgctggcctgacggtggggatattgctggggtcggtcgtcgcgacgctgattaatactcatctgactcctcagggtatccacgatggcggctggcgtattccgttcctgttaggcggcgcgtttggtcttgtcgccatgtatctgcgccgttggctccaggagacgccgattttcctcgaaatgcagcagcgtaaagcattagcgcaggagctgccggttaaagccgtcgcgctgaagcatcagaaagcggtggtggtctcaatgctgctgacctggcttttatccgccggcgtggtggtggtgatcctgatgtcgccggtctggctgcaaaagcactacggttttgcccccgcaatcaccctgcaggcgaacagtattgccactatcatgctgtgtatcggctgcctgctggcagggctggccgctgaccgttttggcgccagccgcacgtttattgtcggcagcgtattcctcgcggcggcaagctgggcgttctatcatctttccggcgatagcccgcagcgcctgttcctgctttacggcgcggtggggctgtgcgtcggcgtggtcggggcggttccgtatgtgatggtgcgcgcgttcccggctgaagtgcgttttaccggtatctcattctcttataacgtctcttacgccatctttggcggtctgacgccgattgcggtgaccatgctgatgggcgtttcgccgatggcgcccgcgtggtacgtgctggcactgtcgttgatgggattggggctggggatctggctgcgccaggggctggaacaacaggtcgctgcgccgaaagctgaactgcagcgcctgccgtaaatcgatagggctcacgtcgccgctcgcgaacgggcggcgacgttaattaatgcttttcgccgattggcagaacggtgcggccaaactgctcgttcagcacttcacccatcgccagatagatggcgctagcgccacagaccagaccgacccagcccgcaatcttaacgatgccttcgttatcagccaggtgaccaatcgccagcagcgcgaacagcacggtcagactgaggaaaacaaactgcagcatacgcgcggctttcagggtgccaaagaacataaacagggtaaaaacgccccatagtcccaggtacataccgaggaagtgcgcgttgggtgcttctgcaaggcccattttcggcatcagaagaatggcaaccagcgtcagccaaaaagcgccgtaagacgtaaatgcggttaagccaaaagtgttgccttttttaaattccagcaggccggcaaaaatctgcgcaatgccgccgtaaaaaatgcccatcgccaggatagctacatcaaacgcgaacaggccgctatttgccaggttaagcagaatagtggtcatgccgaagcccataaggcccagcggtgccggattagccaacttagtgttgcccataattcctcaaaataatgattagaaagggaagcattccccgcctctcagcgacggggcgcggcataataattaggtgctgcgaaactgtctatgatctggcggggtatttttcaccaatttcatttttcacctgatgaagtctggtcatttgccgtaaacaggcaatatgcagtacggccgggatggtcacgcgataagcgctgccgctcacggctttgacgccattaaacgcggcgccgagggggccgccaagccccgcgccgcgaaccagaccgtggccgatgacgctaaccgcggcgtgcgtgcgcaggatcttcgccagccggatttccagaaggtgggtgacgccctgcgccagcttatttgtctgcagcagatggggaagtaacgctttatgctcgttgacccggcactcaacggcagtgaagaagtcagctttctgccgatcgtccatcttcttccagctgtgttccaggaagtgctccagaagatgcagttctatttccggcgtagaggtgtgcttatcggctttgatttttagccgcttgcagacatccagcaaaatttcccggtagaactttccgtgacgacgcagcgtgttggcgatgctgtcgccgccaaagtgctggagctcgccggcaatgagctgccagttgcgacgatagcgttcgggatgccctgccatcgcctggaaagtttgattacgcaatagcgtgcttgaaagacgcggctttccattctcattgtgagtcagaattcgggtgaatgcttccagatgctcttcgctacagcgatgaagaaaagagaggtcttcatcatccagataattaattttcataaataccagataaggtgaacagtgatattaatcgtcgccaatgatttttagcgaggccatgtcggaagagttaatcgtgtggccagaaaaagcgattttttttacgcagcgcttgttatcgttgtcgctattaatgttaatccagtcggtggttgccccctgtttgatggttgacggaacgttgaggctctggctggcgctattgctggctttaaagtacaccgtcgcgcctgacagctggacatcgccgcgatcggcagtgagctggatacgcttaatcacccggcataccggtagcttcagcgtgagatcgttagtctcatttcgcggcatggcgacaatccctaaaattttatgatcgttagcggatgctgacgttattaaggcggcgcttaaaaataaccctgctgatatatgaatcagtgatttcatgaggatttcctgaatattggatgtgtcatagcgggggcgtattttatcaccggagctttattgtctttagcacgtaatcattgcggattatgtcaattgttttatgaatatatttaactttaattattattgttaattatgttttgtgcgtttttaggcccgctttccggaccgcttatgaggcctgctcgccacccgacggcgcgggcagggcaaaaatttttttgtatccccccttgatgccgcggtgggcgaccccatcttgtagtcaaccgcagtgaatgaacctgaaaaaaaatgatgtctgggtagttgaaaccgcacgtttcgcccttattacaggttcacaaccacatgttgactgaatttttagtggagacgtttagatgggtaaaattattggtatcgacttgggtactaccaactcttgtgtagcgattatggatggcactactgcacgcgtgctggagaacgccgaaggcgatcgcaccacgccttctatcattgcctatacccaggatggtgaaactctggttggtcagccggctaaacgtcaggcagtgacaaacccgcaaaataccctgtttgcgattaaacgcctgattggccgccgcttccaggacgaagaagtccagcgtgacgtttctatcatgccgtacaaaatcgttgccgcagacaatggcgacgcatggcttgatgtgaaaggcaccaaaaccgcaccgccgcagatctctgccgaagtgctgaagaaaatgaagaaaacggctgaagattacctgggtgaaccggtaactgaagcggttatcaccgtacctgcttactttaacgatgctcagcgtcaggcaaccaaagacgccggccgtattgcaggtctggaagtcaaacgtatcatcaacgaaccgactgccgctgcgctggcttacggtctggataaagaagtcggcaaccgcactatcgcggtgtacgacctcggtggtggtaccttcgatatctccattatcgaaatcgacgaagttgacggcgaaaaaaccttcgaagttctggcgaccaacggtgatacccacctgggcggtgaagacttcgatacccgtctgatcaactacctcgttgacgagtttaagaaagatcagggcattgacctgcgtaacgacccgctggcgatgcagcgcctgaaagaagccgctgagaaagcgaagattgaactctcttccgctcagcagaccgacgtgaatctgccgtacatcaccgcagatgccaccggtccgaaacatatgaacatcaaagtgacccgtgcgaaactggaaagcctggtagaagatctggttaaccgttccatcgagccgctgaaagttgctctgcaggatgctggcctgtccgtatccgatatccaggacgttatcctggtcggcggtcagactcgtatgccgatggtgcagaaaaaagttgctgagttcttcggtaaagagccgcgtaaagacgttaacccggacgaagccgttgccattggcgctgctgttcagggcggcgtcctgacgggtgaagtgaaagacgttctgctgctggacgttaccccgctgtctctgggtatcgaaaccatgggcggcgtgatgactgcgctgatcaataagaacaccaccattccgaccaagcacagccaggtgttctcaaccgctgaagacaaccagtctgcggtaaccatccatgttattcagggtgagcgtaaacgcgcatcggataacaaatctctgggtcagttcaacctggatggtatcaacccggcaccgcgcggtatgcctcagatcgaagtgactttcgacatcgatgctgacggtatcctgcatgtgtccgcgaaagacaaaaacagcggtaaagagcagaagatcaccatcaaagcctcttctggtctgaacgaagaagaaattcagaaaatggtacgcgatgctgaagctaacgcagaagctgaccgtaagtttgaagaactggtacagacccgtaaccagggtgaccacctgctgcacagcacgcgtaagcaggttgaggaagcaggcgataaactgccggctgacgataaaaccgctatcgagtctgcgctgactgcgctggaaacttcgctgaaaggtgaagataaagccgatattgaagcgaaaatgcaggcgctggcccaggcttcccagaagctgatggaaatcgctcagcagcagcacgctcagcagcaggctggcggcgctgacgcttccgagagcaacgcgaaggacgacgatgttgttgacgctgagttcgaagaagtgaaagacaaaaaataatcgccctttgaacgggtaaaacactggcacgggcgaagaggtttcctctccgcccgtgcacgcatgttaaggggctgaaaaacaccaatggcaaagcaagactattacgagattttaggcgtttccagaacagcggaagagcgtgaaatcaaaaaggcgtataagcgcctggccatgaagtatcacccggaccgtaaccagggtgataaagaggctgaagctaaattcaaagaaatcaaagaagcgtatgaaatcctgaccgatgcccagaagcgtgcagcctacgatcagtacggtcacgccgcgtttgagcagggcggcatgggcggcggcagcggtggttttggcggcggcgcggatttcagcgatatctttggcgatgttttcggcgatatttttggcggcggacgcggtcgccagcgcgcagcgcgcggctcggacctgcgctataacatggatctgacgctcgaagaagccgttcgcggcgtaaccaaagagatccgtatcccgactctggaagagtgcgacgtttgtcacggcagcggagccaaagcgggtagccagccgcagacttgcccaacctgtcacggtgcgggccaggtccagatgcgccagggtttcttcgccgttcagcagacctgtccgcattgccaggggcgcggtacgctgattaaagatccgtgcaataaatgccacggtcatggtcgcgttgagaaaaccaaaacgctgtcggttaaaatcccggcgggcgtcgataccggcgaccgtattcgtctggcaggcgaaggtgaagcgggcgagcatggcgcaccggctggcgatctgtatgtacaggttcaggttaagcagcacgccatattcgagcgtgaaggaaataatctgtactgcgaagtcccgattaacttcaccatggccgctctcggcggagaaattgaggttccgacgctggacggtcgtgtaaatcttaaagtgccgggcgagacgcagacaggtaagctgttccggatgcgcggtaaaggcgtgaagtccgtgcgcggcggtgcgcagggcgatctgctgtgccgcgtggtggttgaaacaccggttggccttaacgataaacaaaagcagctgctgaaagatcttcaggagagctttggtgggccaacgggtgagaagaacagtccgcgctctaaaagtttcttcgatggcgtgaagaagtttttcgatgatttgacgcgctaattgctattcatttcctgactttcttcaagcctgggccttcgtgcccaggcttttttctatcaggcttctacactatttaaattaacctattatttatcagggctaacaattgatttattttgagtattatctatattgcttttttcatttttagaggcctacagcggatgggatcgaaaggtgccaataaggattttgattataatttaatcaagactcttgacgctgttatttcggctggaaatgctgctaaagcagccaaaaaacttggaattaccccttctgccgtgtcattggcgctccgccgtttacaagggtattatcaggaagagttgtttgttcgtggtaaggatggtctgttacctaccgcgaaggcgattgaaatctatcaaaatttccgtcaggtgatggaattggtagagagcacatttatttccgacaaaaaagataacgctgacgccaggatgactattttaggcggagatatcgttgagacttactacctctctcagctttatgcagacgatatctttgagcgcgtgttacttaatcattattcatcacgaaacctttcccgcgaggtgctggctgatttactactcactgcggaatgcgatcttctgattagcagcgagccgttgaatatcccgggaattgataatcagcttatcgacagcttcaggagctttgtttgcattttcgccagcaaccatatcctgagtaccttacctcatatctcattacatcatttctattcttctcgtcacgcgatgtatcaactgggtaggtattcaccgatgattataaatgataaaggcctttttaaagataatttttattataaaggatcgcgcattatcggctatcgcagcgattcactcaatgggatgttaagtatgattgaacgcacctcattaatcgcattaatgccgttaaagctggcacttttttataaaaatcagcgcaaatatgatattaagtttgttcagccgccacctgaacttacgttcaaatctatacagatttatgcatcatgggacaaaaatagtaaaaatatatccatcattaacgaagttgtctcccggttacacacgctgtcatcatttcgtcgctgaggagtatcttttcaaacactatatcaaatatggtttggtttgatactctttgattattttaaaatagtcaacctacctacactctggtggtgcctttttatatgagttaatcaaggagtgtactatgtctattcccaaccatctcgaaaccacggaagtcgttttgctggaagtcgaaatattgttcaccattattgctaccggcgcctgggggggatttgttagctatcttatccgccgtgataggcaagagggtgacgatcattcccataagggaatcatgcactgtttgacccaggtggtggtttcctgttttaccagttttttgctcagcgctgtagcgattgaaaaagagcttagttttaatatggtgctactcgccgccggtcttggcggagtattcgcagggccgattttaaaaattcttggcgagaaaattaaaaaagcgctggatgacgcaaaaatacattaactacatatttaatgtatatcgttcatgataaaaggctcatccctgagtcttttattagctataattaaataatcgtgttatttgactctggctttcatccagccaaaaatgaactcttcattttgtctatttttttcagtgatatccaggtagtaggcgccctggctacagttgagcgctttgactaatacctcctccccctgcttaccccgtaaggtcagaaaatgcttgagggccgcgagcgttcgggggccaatcttgccatcggttttgatatcctggtagcttctttcttcccgatttagtgcatttagccagcgctgtagccacacgcagggatagtgggggccaatattgactgcggcatcgcagagttcaaaggaaatgggccaggagagtgttgatatctgctcgaagccgggtttaatccaataatcttcttcgagaatagaaaatgcttcagttcgcgtcaggttgatcatctcaccggtataaccatgggcccgggctgtcgcctcagtgattccccagttggttgcaccacctttatctttcgggttcaggctgtaaccaccttccatcgccaaaatgccatcaatgattgggttcattttttctctccttgaattaatgaatatgcaaatacatcactgtaccgagggtgacagaaaagaccgtggttaatgctgccagcgtctttctgaaaacctgtcgtttgttttctttcttcttgctttccattgctttaatagggatctctttattaacttgaatgccttgtcttgggatggtgataaagagatcgtttattccaagcgacttcagatctcgtctgatcaggtagagtatttgcgttaaatttgcatcattgacaaaatggctacgacttccccataactctgtggttattttttggcgctcaataatatccatatcagcattttcgatgatgaagctaagacacttcgccctcattgccgtcattttaatgacctttgagttggaagcggttctcagttcatactttccttcattataaacgcaattgtcgttgatgagataagttttcatattgtcgtcctttagatatgatcctgtttgcttgcgttaaatatattgtacgagaattgtcttaatctattacttgtcatccgtattattgtaatgtcatttgatggtgagagcttaatcacataatctcatgtaagttaaatgatatttaactaggtgattaatgatatttactatgctgctgatgttttaatcccgttttgatgagatgcgtttacctgctgatgagccggagattattactatcattttagcctcataaattagcgtgaagtctgtatcgaaaacgtgatgttttgtgattagccatcgcctcgtaaggattggattattggcccggcagaacgaactgcgacaatttttcaaacttaaaaggaaattaaaaatggctaccagcaaattgattcaaggcgatacgctgaccgaaaccagcaacgccgctgacggctttaaccctgcaacagaagtgagcgcatacagctatacctccgctcgcgtcgctaaaccggtctataacaaatacaaagcctccaccactaaacccaaagtcttcggctactacaccgactggtcacagtatgatggtcgtctgcagggcgatgattcaaaagataaccgcggtcgcggctacgacctggccaacgtttctcctaccgcctacgacaaaatcatcgtcggtttcgtcggcgtgaccggcttccacaaagtagacaacctgtggcgcgacgtggttgccgaaggtgccgatcagtgcggaaaagtgaagtacgagcccaccttcctcgacccgtggggcgacttccagtcttacgttaacgttggccataccgtcagcggctgggatgtcgatccgaagaccgtgacccagagtaatactaagggcctgctcggcggcctgcgcgatctgcaggccaaagcgaagcagcagggccacgacctggtgctgtccatgagcatcggcggctggagtatgagtaacggtttccatgaaaccgccgcgtctgacgccgcgcgtaaggtctttgccaaaggcgtggtaaaactgttcaagcagttcccgatgttcagcgaagtggacattgactgggaatatccgaatgccgaaggcgctggcaacccgtacggcccggaagacggcgagaactacgccctgctgattggcgaactgcgtaagcagctggacgccgcaggcctgagcaacgtcaaaatctccattgccagctcggcggtggtcaagacgctcggctactccaacgtcaatgcgctgctggaagcgggcctgtacggtatcaacgtcatgacctatgacttcttcggtaccccgtgggcggagagcgtgacccaccacaccaacctgaaggcgctggaagaaggcggctggggggtggataccgttgtcggccatctgctgtccgaaggcttcccggcagagcgcatcaacattggttacgctgcctacacccgtaacgggcgcaacgcggagctggaatccctgtccccgctgaaaggcacctataacccgggcaccggcaccaccgtcggctccttcgaatcgggtaccaccgaatggtacgacatcatttataactacctggatctggaaaaccagaaaggccgtaacggcttcaacgtctacaccgacaaggttgccgacgcggactacctctacaaccctgacagcaaactgttcatgtccctggatacgccgcgcacggtgaaagccaagggtgaatacgccgccagcctcggcctgggcgcgctgttcacctggacaatcgaccaggacaacggcgtgctggttaacgccgcccgtgaaggtctgggctatgaaatggcgtctgaagttatcgatatggagccgttctatttcgaaggcatcaacgtcgacccggcggatgaaccggatgaagaagatgcgactaccgacgtgaaccacgcgccgaaagccgccgttgaactgcgcgtcgtcggcggctctaccgtacagctttccggtgaaggatcctctgacgaagataaagacgatatcaccttcagctggggtgttccgtctgaaatcaccgtggctgacaaaaccgttcccgtgatcgagttcgtcgttccggacgtttccgttaaaaccaacttccagttcaccctgtttgtccgggatgtctggggcgagccttctacccagcagcgtttcgtgctggtcgccgttccggctgcgtctcagattcaacctgagccggaagaggaagatagcgttgtgcccgtagagccggaagaagataccacgccggcagaagatgagacttcgggggatgacgcgactacgccttatccgctgtgggatgccgcaaccgtgtacggtgggaactgggggtcattcgaaacggtaagctggaaaggccataactaccaggtgaaatggtggtctcagggcgatcagccggacctgaactgcgctgcgggccaggcatggactgaccttggtgcttactaatccttttcattaaaggaaaaggattgagttcaacaatacaagccccggaaaaccggggctttttccaccagggaacgaggagtgttgtcaatgacggtctcgattaaaaacagccagatcgatgtgaatagctggtatcagaaaatcacgttaaccatcaccaatgaaaataaccgtgccgtggatatgaatcatgcggtcattagctttaccgggtccggccatcaggatccgtggggaaattttggcggtaccctcaaaggggacatgcctcttacgttaagcggtaaatcacaggggaccgttgacgtcaatgaaatcattattaataacagccggcagctgttactgcagccgggcgaaagcggtacgttattcttcagttttgccgccactcaggttccggtaaaactctcgaccttcacattaacgctggcctcttcggcacaagacgagacaacggatgacgctgcagatgaggttgagcccgaacctgaagttcccgccgatgatgatactgatagcctgaagcccgaacctgaagacaatatccctgctgatgaggaaacggatgaggttgctccggaacctcaagagcagggtgatgatgcggttgaggaagaggaagggatagttattgcggcaagccagctgagtacaaccagctggtatcagcgcgtcaccctgacgctgaccaatctctattcccactctatcgatcttaatcaacttaagctggagtttaccgccagcgggcatcccgatccttacagcccgttcagcggttctttgctcggcaataagcccgtgacgctgggcagcgacggcggttggcccatcgagaaaaatacgattaccattcatcatgatggcgagttctggctgacggccggggccagcgccgagctgcagttctttctttccgctacccaaactccggtcacgatgagcggcttaaccgcaaccctggcgcacgatcctggccgtcaggggacgattgaaattgagtttccaccgttggcggaaagcacaaccctcaagccgaccatcgatctgcgctatccagacgcaacatcacaacgctttgccggcgagtggggacaggctttagtcatcggcgatcttagcgccggcgattacgctatcaccgtgctggagctgtgcaatgatgatatgcggatcgcgcccgttgaatcgacgtattcgcttaagcttgtttccggtcatgacgcccaaacctgccgggttgcgtatcaatcgccagtaccgttggcttcggtacgcctgactgtcgatgcccctgagttcatcggcgcggaaatggtggttgagctgtggacggaatctggcgtctgcgaaagaaccctgacaatgcccgtcaatcaaatgcagctggtgacccggcttaccgcggggcaccgctatcagatgggtttgcaacctgcggttatcaataaccagatggtgacgactcccgccctgccgactatttttacccctgaacaaggggtggcgaaagaggtgctcgtcggcttccggcagacggaggttgatagccatgattttgttgaggttcaggccactatactgggcttgcctgagggcgtttcgccccagcgctatcggttctgctatgggcaatatcaatatactctgatgctggagagcactccccatctgcaaacgctggcgatgcctatggctcctggccagtacagcgttgaggcgccagaggtttatctctccgggacgccgtggcgctgtgaaccggacgcgccgctgcggctgttgcaaagcgtcaaccatatcaccctggagtttgttcagggcgttcccttgcaggttaaaggctggccaaactatctcgcccacggtggcgtgacggtgaatgcggcggacaccgtatcgctataccgcgacgtcccctttagcgccctgtttaaatacgatggttttgatggcggcggtgaccctgtcccggctgcggaagtggataaaaacggcgacggctttcttgattatgattcgctcccgattcacaaaaccgttcctctggtacgtgagattgaaaaagaggcgggccgttgcgtaatgccggtcatggtggtgtataccgccaatgccagcggcggcagcgcgctcgccgatctccaggacgctcagcggttgcgtaaccattttggcaacttcatcacccagtgtctcgcggcgcaatcctggaaggatgacgagcatccggttcccgccacctttgtgctgaaccccgattttcttggcgcgatgcagcaggagccgtatggctacgctgcggtgcgtcaagcgaatagcatgcaggttaatgtccaactggcggccgcgattaacgctttgcctgcgcttccgggattcagcgcgccggtgttgccgacgttctctaacgatctctacggttatgtccaggcgatcaactacattgtgcggcagttcgcgccggatgtggcattcggctggcagacaaacgtatgggcgacgggaacggcagattgggtactcaggccgaacgccgatccggccgcgcaggggaccgctatcgccaactttatcaatgagctgggtgtctatagcggtgagtatgcgccagactttatcgcttttgataaatttgagcgcgattgctttagccctgatgcattagcgcactatgcctggaacgcgacctgctggtttaattatctggggatggtaaaacacgcggctaaagcgctgcgtaaaccggcaatgctgtggcaaattccgggcggccatatgccaaccgtggatgaaggcagcagtaaaattgccgccgcgcattacgcatcgggcggaagcttctttatgggcgatgcgcgtattggctgcgatctcgataccatcgcgtcagatctgctcaatacggcggtgaatagcgcaacttacggcgcggcgaccgtcggtgactttttacgccaggataagggttacgactgggggcaaatgcaggcattgaatctacccgactaccatgttttctcagtactgtggggcggcggctcgacggtaagcataaccaccattcactctaatggtgaagatggcggttggcttgcagataaaatggttgagtattataccgcaccggcctatttcagttaatgtcacatttaccccgccatagcgcctgaaaaatgcatcgctgttcatagtgattcagaatatttaatttctgaatcactatttttagtgtatttttatttcgtgagagatagtttcagcagttattttattgttatgttaattttttgttttgcgatttatttgtggttgttgaagtttatattaagaatttgcgctttgtgctaagtattgcgttttcgtgcttgcggctaaaaatatacttccgggaggatgtttataatgaattgaagataacctccgttaagtatatcttggggtaatctatgattatggtaataatgaaaaatgaaattagacgttgctgaaaatgataatgggaacaccctgcattcctatcttttttcccaacaggctaaaccgcatgcagcgcttgatgcactcttcgcctcgctatggtccttcggtaaaccttttaatttggctcccggagatgagtttttactgaattcagacggggaaaataaaattgtgctgctggagtcaggtatattttccttttgccgctgtggcagcggacttcatgttaattcctcttttgctcccgccattatcggattagtcgatagttatggggtgacttacaattttccgacccggccagaacactttctgatagcggaaacgaagtgcagcggacgcgcagtgtctctgcccgactttatcaagactgttgatgagtgcgatctgtggcacgatgtcgcacgaatacttgcctatcgtctgatggtcatgagcgtacgcgatcgtgaattggtcggtgtggattcttatctgaaggtgagatcgttattaatcgagctttgggcttatgccagcgaatatcgacaaagtattaatgtgcttaacttcattcaacgccgaacaggaatttcccgtagccgtaccatgaagcttctctctgaactgaaaaaaggcggctatataactattgatggcggccgtttaatagatatgaaaaaattacccacggctttttaatacttttcagggcaaaggtgtttattagtattagtagtcaccttttaaactttcttggtacggaaattgtcgagatattcatatattgattatcctgtcaatcatgctaatgacgtaaagagagatttcccattggtataatttttaaatatcttatgggacataaaaaagtcgacgatcgcggcaaccgctcatgcatcatcccattcacgctaagctaatacgcataaccatgaagatggcgatacggattctttccttatggccgttgaggatggggctggcgtacctctgacttcctgttcggacaacgcagcgtcacccattgacgagcggacggccaatctcttaatgagggttaattcgtaaaaaacgaatgtaatggcaatttaaaactgattttttcgaggtttccgcatatgtactatgcttttatcgagttgtttgcggatatggtgaggtaaaagtgaaacatctgcagcgtttttttcagagcgatgcttccgggggcattatcttaatcctggccgctatcatggccatgttattagccaataccggcatgaccagcggcctgtatcgctcttttctggaaacgcccgtccagctgcgcatcggtgcgttagagatcaacaagaacatgctgttgtggattaacgacgcgctgatggcggtatttttcctgcttatcggtctggaagtgaagcgtgaaatgaatcagggggcattggccagccgtcgccaggcggtgtttccggtggtcgcggcgttgggcggaatggtggttccggcgctggtctacctggcgtttaacggccaggatgcgattgccagagaagggtgggcaattccggccgccaccgatattgccttcgcgctgggcgtgctggcgctgctggggaatcgggtgcccgccgcgctgaagattttcctgatggcgctggccattatcgacgatctgggcgccattattattattgcgctgttctatacgcacgatctttccgtcgtctcattggttgtcgctgccggagccattgctgtgctggcggggttaaatctgtgcggcgtacggcgtaccgggatctatattctggtgggcgccatactctggaccgcggttcttaagtcgggggttcacgcaacgctggccggggtcattgtcggctttatgatcccgctaaaagagcagaacggcaaatcgccggcgaagcagcttgagcacgtgctgcatccgtgggtggcattcctgatcctgcccctgttcgccttcgctaacgcgggcgtttctttgcagggcgtcacggtagaagggctgacctcactgctgccgttgggtattattgccgggctgtttatcggtaagccgttgggtattagcgtcttctgctggctggcgctgaagctgaaatgggcttcgttacccgaaggaaccacctgtaagcaaattatggcggtcggcatcctgtgtgggattggcttcacaatgtcgatttttattgccaccctggccttcggtagcgtcgaccccggattgatcaactgggccaagcttggcatcctgattggatcgatattatcggccgtcacgggatacataatattgcgtaagcgcgtaacggattcgggctacgcggcttaacatctcacggagagccgctacggctctcctggacattatcagggagagaagcatgtcgcatatcaactacaaccacctgtactacttctggcatgtctacaaagagggctccgttgttggcgcggcggaagcgctgttcctgacgccgcagaccattaccgggcaaattaaggcgctggaagaacgcctgcaggggaaattgttcaagcgtaaaggaagggggctggagcctagcgaattaggtgaattggtgttccgctatgcggatcgcatgtttacgctgagccaggaaatgctcgacatcgttaactaccgtaaagagtcgaatctgctgtttgatgttggcgttgcggatgcgctgtcgaaaaggttggtgagcggcgtactggatgccgccgtcgtcgagaatgaacagatccatttacgctgcttcgagtcgacccacgaaatgctgctggagcagctaagccagcataaactcgatatgattatctccgactgccccatcgattccacccagcaggaagggctgttttcggtgaaaatcggcgagtgcagcgtgagcttctggtgcatgaatccgccgccggaaaaaccgttccccggctgtctggaagaacgccgtttgctgatccccggccgccgttctatgttagggcgcaagctgctgaactggtttaactcgcagggtttgcaggtggagattctgggcgagtttgatgatgcggcgttgatgaaggccttcggcgcggcgcacaatgcgatatttgtcgcgccgacgctctatgcgcatgatttctatagcgatgagtcgatagtcgagatcggacgcatggacaacgtcatggaggagtatcacgccatctttgccgaacgaatgatccagcatccagcggtgcagcgtatttgtcatcgcgactattcggcgctctttacgccgcctcaggcataggccagaacggtttcttgccgcgcggaaaataccccaccagttcatgcggaagcatgagctggctgcgataaccagaacgcgagtcgtgacgtattacgtgataaacgacaggcataaaaaaaacccgctttcgcgggtttttttacaaagcgacaacaagcaggcgattaagccagtttgttgatctgagcggtcaggtttgctttatgacgcgcagctttgtttttgtggatcagacctttagcagcctgacggtccacgattggttgcatttcgttaaatgctttcagtgcagtagctttgtcgccagcttcaatagctgcgtatactttcttgatgaaagtacgcatcatagagcgacggctagcgttgtgcttgcgggccttttcagactgaacggcgcgcttcttagctgatttgatattagccaaggtccaactcccaaatgtgttctatatggacaattcaaaggccgaggagaatgcccgtttagccttcttttgtcaatggatttgtgcaaataagcgtcgtttaaaccaacaacgctttattacgtagtgatggcgcaagattctaccagcttgttgcaggcgaatacagcctttcgaccataaaaatcgacgacgctggagagattttcccgcaatctcgcgctgagtgaatgaattcccgggatctttcggtgaagaggtgcaatcgctggttaacgtcgccagttgtacaaggtatactcggacgattttcactgttttgagccagacatgaagctgatacgcggcatacataatctcagtcaggccccgcacgggtgcgtgctgaccattggaaattttgacggcgtgcatcgcgggcaccaggcattattgcagcgtttgcgcgcagaaggtcgccagcgtggcttaccggtggtggtgatgatttttgaaccacagccgcttgagctttttgccgccgataaagcgcccgcgcgtttaacgcgcctgcgtgagaagctgaattatctggccgaaagcggcgtcgattacgtactgtgcgtgcgcttcgatcggcgctttgcggcattgaccgcccaggactttatcagcgaactgctggtgcgccagctgggcgtccagttcctcgccgttggcgatgatttccgctttggcgccggtcgccagggggatttcttgttactgcaaaaagccggcgtggagttcggctttgacgtcaccagcactcaaaccttctgtgaaggcggcgtgcgcatcagcagcacggcggtacgccaggcgctggcggacgacgatctgcccctcgcggagacgctgctggggcatccgtttaccatctccggtcgcgtcgtgcacggcgatgagctcgggcgcacaataggcttcccgacggcgaatttaccgctgcgccgtcaggtttccccggtaaaaggggtctatgcggtagaagtgacagggcttggcgacaaaccttttatgggcgtcgccaacattggtactcgtccaacggtctccggcgtgcgtcagcagctggaagttcatctcctggatgttgtaatggacctctacggtcgccatatagatgtaatactgcgtaaaaaaatacgtaatgagcagcgatttgcgtcgcttgatgagctgaaaacgcaaatcgcacgtgatgagttaacggcccgcgacttctttgggctaaccggccaggcataaccctgacggtgtttatcaaaccgaaatacggaaccgagaatctgatgagtgactataaatcgaccctgaatttgccggaaacagggttcccgatgcgcggcgacctcgccaagcgtgaaccgggaatgctggcgcgttggaccgatgatgacctgtacggcatcattcgtgcagccaaaaaaggcaaaaaaaccttcattctgcatgatggccctccttatgcgaatggcagcattcatattggtcactcggttaacaagattctgaaagacattatcgttaagtccaaagggctggcgggctatgactctccgtacgtaccgggctgggactgccacggtctgccgatcgagctgaaagtggagcaagagtacggtaagccgggtgagaaattcaccgccgccgagttccgcgctaagtgccgcgaatacgccgccacccaggttgacggacagcgtaaagactttatccgtctgggcgtgctgggcgactggtcgcacccgtacctgaccatggacttcaaaaccgaagccaacatcatccgcgcgctgggtaaaatcatcggcaacggccatctgcacaaaggcgctaagccggtgcactggtgcgtagactgccgttccgcgctggcggaagcggaagtcgagtattacgacaaaacctctccgtccatcgacgtggcgttccacgcggccgataaagcggcggtgctggcgaaatttggcgtggccgacgtcaacggcccggtttctctggttatctggaccaccaccccgtggaccctgccggcgaaccgcgccatctcgctctccccggagtttgactatgcgctggtgcaggttgacggtcaggcgctgattctggcaaaagacctggtcgacagcgtgatgaagcgcgccggcattgctgattacaccatcctggcggtggtgaacggcgccgagctggaactgatgcgctttaagcatccgttcctcgattttgacgtcccggcgatcctgggcgatcacgtcacgctggacgcgggtaccggtgcggtgcataccgcgccaggccacggtccggatgactatgtcatcggtcaaaaatatggccttgaagtggcgaacccggttggcccggacggcgcctatctgccgggaacctacccaacgctggacggcgtaaacgtctttaaagccaacgatgttgtcgttgcgcttctgtcagaaaaaggcgcgctgctgcacgttgaaaaaatgcagcacagctacccgtgctgctggcgtcacaaaacgccgatcatcttccgcgccacgccgcagtggttcgtgagcatggatcaaaaaggcctgcgcaaacagtcgctttccgaaatcaaaggcgtgcagtggatccctgactggggccaggcgcgtatcgaatcgatggtcgccaaccgtcctgactggtgtatctcccgtcagcgcacctggggcgtaccgatgtcgctgttcgtgcataaagagacgcaggagctgcatccgcgcacgctggaactgatggaagaagtggcgaaacgcgtagaagtcgacggcatccaggcgtggtgggatctcgattcccgcgacatcctcggcgccgacgcggatagctacgagaaggtgccggatacgctggacgtctggtttgactccgggtcgacccactcttccgtcgttgacgtgcgtccggagttcgccggtcacgccgccgatatgtatctggaaggctccgaccagcaccgcggctggtttatgtcatccctgatgatctctaccgcgatgaagggcaaagcgccttaccgccaggtactgacccacggctttaccgttgatggccagggccgcaagatgtccaagtctatcggcaataccgtttctccgcaggacgtgatgaacaagctgggcgcggatattctgcgcctgtgggtggcttccaccgactacaccggcgaaatggcggtctctgacgagatcctcaaacgcgccgctgacagctatcgtcgtatccgtaacaccgcgcgcttcctgctggcgaacctcaacggtttcgatccggcaaaagatatggtgaaaccggaagagatggtcgtgctggaccgctgggcagtaggctgcgcgcaagcggctcaggacgatatcgtcaaagcctacgaatcctacgacttccacgaagtggtgcagcgcctgatgcgcttctgctccatcgaaatgggctcgttctggctcgatatcattaaagatcgccagtacaccaccaaggctgacagcatcgcgcgtcgtagctgccagaccgcgctgtaccatattgccgaggcgctggtgcgctggatggcgccgatcatgtccttcaccgctgacgaaatctggggttacctgccgggcgaccgcgagaaatacgtctttaccggcgaatggtataccggcctgtttggcctggacgctgacgaagcgatgaacgacggcttctgggacgcgttgctgaaggtgcgtggcgaagtcaacaaggttatcgagcaggctcgtacggacaagcaggtgggcggctctctggaagcggcggtaacgctgtacgccgatgccgatctcgcggcgaagctgaacgcgctgggcgatgaattgcgatttgtcctgttgacctcaggggcgaacgttgccgattatgcgcaggctccggccgacgcctggcagagtgaactgctcaaaggtctgaaagtcgtgctgagtaaagccgaaggtgacaagtgcccgcgctgctggcattacaccacggatatcggcaaggtggcggaacacgcggatatctgcggacgctgtgtcagcaacatcgccggtgacggcgaaaaacgtaagtttgcctgatgagtaaaccgatttgttcaacggggttacgctggctgtgggtcgtcgtagccgtgctgattatcgatttaggcagtaaattcctgatcctccagaacttcgctctgggggatacggtatcgctgttcccatcgcttaatctgcactatgcgcgcaactatggcgcggcttttagcttcctcgccgacagcggcggctggcagcgctggttcttcgccggtatcgctatcggtatctgcgtgatccttgcggtgctgatgtatcgttctaaggcgacgcaaaagctgaataatattgcctacgccctgattattggcggcgcgctggggaatttattcgacaggctgtggcatggttttgtcgtcgatatgatcgatttctacgtcgggaactggcacttcgccaccttcaacctcgccgataccgctatctgcatcggcgcggcgctgattgtgctggaaggcttcttaccgaacgcggctgcgaagaaacaggcgtaacaaactcgcccggcggcgctgccgccgggcaaaacaagtgagcaacctgcatgtctaaatcagtacagagcaacagtgcggtgctggtgcacttcaccttaaagctcgacgacggctccaccgcagagtcaacccgcaataacggtaaacccgcgctctttcgcctgggcgatacctcgctttctgaaggtcttgaacagcatctgctggggctgaaagaaggggataaaaccaccttttcgctggagccggacgccgcgtttggcataccgagcccggacctgattcaatatttctcgcgccgggagtttatcgacgcgggcgagccggaagtcggcgcgataatgctctttaccgcaatggatggcagcgaaatgcccggcgtgatccgcgaagtgaacggcgattcgatcaccgttgatttcaatcatccgctggccgggcgtaccgttcattttgatgttgaagtgctggagatcgatccggcgctggaggggtaagatgcagattctgttggctaacccgcgcggcttctgcgcaggcgttgaccgcgctatcagcattgttgaaaatgcgctgacgctatacggcgcgccgatctacgtgcgtcatgaagtcgtgcacaaccgctatgttgtcgacagcctgcgtcaacgcggcgctatttttatcgagcagattagcgaagtgccggacggcgccatcctgattttctccgcccacggcgtctctcaggccgttcgcaacgaggcgaaaagccgcgatttgacggtttttgacgccacctgcccgctggtgactaaagtgcatatggaagtcgcccgcgccagccgccgcggcgaagagtcgattctgattggccacgccggtcacccggaagtggaaggcaccatggggcagtacagcaacccgcagggggggatgtacctggtggaatcgccggacgatgtctggacgctggacgtgaaaaacgacgctaagctgtcgtttatgacccagacgacgctctccgtcgacgatacctccgacgtgattgacgctctgcgcgagcgcttcccgaaaatcgtcgggccgcgtaaagatgatatctgctacgccacgactaaccgtcaggaagccgtccgcgcgctggccgggcaggccgacgtggtgctggtggtggggtcgaagaactcctctaactctaaccgcctggccgagctggcgcagcggatggggaaagcggcctatctgatcgacgacgcgaccgatatccaggaagcctgggtcaaagaagcggattgcgtcggcgtgaccgcgggcgcatcggcgccggatatcctggtacagaacgtgatttcgcgtttgcaggagctgggcggcggcgaagcggtgccgctggaaggccgcgaagagaacatcgttttcgaggtgccgaaagagctgcgcgtagatgtccgtgaagtagagtaagttctttttcgccgcagtatgagaagatgccagacttaacgtctggcattttttatggagaaacgatgcgcttacctatcattctggataccgatcccggcattgatgacgccgcggcgattgccgccgcgctgttcgcccccgagcttgatctgcagctgatgactacggtggcgggcaacgtgtcggtggagaaaacgacccgcaacgcccttcagcttctgcatttctggaacgccgatgttcccctggcccagggcgcgtcgatgccgctggttcgccctctgcgcgacgccgcctcggtgcacggcgagtccggtatggaaggctacgatttcgttgaacatcaccgccagccgctggcgaaaccggcgtttcaggcgatccgcgacgcgctgatgcacgccccggagccgatgaccctggtggcgatcggcccgttaaccaacattgcgcttctgctgacccagtacccggaatgccgctttaatatccgtcgcctggcgatcatgggcggctccgccgggcgcggcaactttacgccgaatgcggaatttaacatcgccatcgaccccgaagcggcggctaaagtgttcaacagcgggctggatatcgtcatgtgcgggctggacgtcaccaatcaggcgatgctggcgccggattacctcgccactctgccaacgttgaatcagaccgggaaaatgctgcacgctctgtttagccactaccgtagcggcagcatgagcagcgggctgcgtatgcacgacctgtgcgcgattgcgtggttggttcgcccgcagctctttacccttgaaccgtgctttgtggcggtagaaacccagggtacatggacctcaggcaccacggtggttgatatcgaaggcaggctgggccagccggcaaatgcacgggtggcgctggggctggacgtcgaaggatttcagcgctgggcggccgaggtgattgccctggcgccttaaccgggggacgaagcggccggcgcggcgctcaggtattgtgagtggcatcaacgacgttgcgccatagcgcgcccgcttcatccgtccacataagcagtaagagcgaagctaatcgttccgccgccgcggagagaggtctgttctttacgcggatcataccaagcgtccgccggataaccggctccacgagcggaacgctcacgacggtgctattgccgctatggggcatagccagacagggaagcgccgagacgcccagtccggcttcgacaaggccgagcgaggtcgacaaatgcctgacttcataaaaccaatccagtcgccagggcttatccgccaggcatttctctattaactgtcggttgccgcttgatttcctgacgccgattaaggtctggctcaccagttcccgccattcgactaattttcgacacgccagagggtggtcttgccgacaggccagaacaaaaggctcattcaccagggggataaaatcgatgtctggatatgtgatgaagttcatgtttattccaaaatcaacttcgccttttcgtaccgagttcatgcacgtttctataccttgttcataaattcgtactttgatgttggggtagtttttattaaattgcacgatagcgcgcggtaaaaagtaaaatacggcggtcggaatgcaagatagcgtaacggtatcatgtaattgagacgttgaatcgttgaggttaaatattgccgcatcaagactggaaatcaacgctttggccttggggagcagtatttttccggcctgggtaagcgcaagttttcgcgtggttcgttcgaacagcgcaatattcagatgactctctattttttttatctttttggtgagtgccggctgcgagaggctgagctgctcggcggctttgctaaatgagccaagctctgccaccgtgacaaaggctttcataccggatagttcatttttcattattgctccgtagggtttaataagcgttgttctaagtagacgacaagtcattattaagcagacatgcttttttattaatacttagcaggaataactcttatggcaaaattttatcaaccagcgaaattcttgcaagtagaatgaatcggtaaaatatctgacgtgatttatctggccgttaattaagtaaataaaaatcttaaagaacataaaaccaattaaattcacgcggcgttttattcaattcttctatttatttctggcggataaggaacatgctatgaagagcattccctgtgtattaatgcgtggagggacatcaaaaggtgcctttctattagcagatgatttacctaaggatattcagaaacgtgatgagtgcttgttaaccataatgggatccggtcacgagctggagattgacggtattggcggagggagcccgcaaaccagtaaagtggccattattagtcaatccctaagcgacaaagcggatatcgattatctgtttgttcaggtcatcgtcaatgaacggcgggtggatacgacgccaaactgcggcaatatgctgtgcgcggttggcggctttgccattgaacatgggttggttaaggcggtgtcgccggttacgcgagtgcgtataagaaatgtgaacaccaatacctttgttgacgctgacgttcaaacaccagatggaaaggttatttatgaaggcgatacgaaaatcgatggcgttccaggccatgccgcgccggttgcgctgacttttctgaatgccgcgggcgcaaaatccggccagcttttcccaactggcaatcgtatggaagtctttgataatgtacgagtgacctgtattgatatggcgatgcctatggtggtgatcccggcccagagtctgggaaaaaccggatatgaatctgccagcgaattagatcgggatacagccttactcaaatcgctggaatctattcgccgtcaggccgggaaggctatggggtttggggatgtgagcaatatggttatccctaaaccggttctgatttctccggggctaagcggcggaacgataaatgtacgttattttatgccgcataactgtcataaatcgctggcgattaccggcgctatcggtctggcaagcgcatgcgttattccaggcaccattgcgaatgaactgacgaagctatcgggcgatggcgttattacggtcgaacaccccagcggggggatcgacgtcgatttaagtcatacagctgagcgcccggaggatattcgggcatcggttatacgcaccgcgcggaaaatcctttcaggaacggtttacatccccgaataaatatccaccctccgcttatctatcaatccaccgtagaagaggagaggggaggcatgtgaatacgttcagcaagcatcctcaaatattgagtgcaggtaaggaatggaaatgcaaaataataaattatggaagctgcttgttattatagtaataccgttactcatcagtttatgcccggcgccggaaggattatcaacacttgcctgggtattatccggtatctatctggcagcgattgtaggtttagtgattaaaccgttttctgaacccgtggtattgctgatcgccgttgcggcatcaatggtgattgtgggcaatttgggtgacggttcgataaaagccgccagcgtattaagcggatattcatcaggtaccacctggttagtcttttctgcatttaccctgagcgcggcatttgtgattaccggattgggtaaaagaattgcttatattcttatcggcaagattggtagcacgacgttgggccttggctatgttaccgcttttcttgacctgattctggcgcccgccacgccgtcgaatacggcccgcgccggcggcattgtcttacccataatcaatagcgtcgccgtcgccttagggtcagagccggagcggagcgcgaagcgcgtgggccattacctcatgctgaacatctatatggtcactaaaacgaccagctacatgttcttcaccgccatggccgggaatatcctcgcgctgaaaatgatcgaagatatttgccacctaaaattgagctggggaggatgggcgctggccgcaggactacctggcatcattatgttgctgctgacgccgctgattacctacaagctgtatccgccagaattaaagcgggttgataataaaaagattgctcagacaggcatagacgctttggggccgatgacggtgcgggaaaagatgctgtcttgcctctttgttcttgcgctcggcggttgggtattcagcagcgccctgggggtcaatgagtctaccgttgcaatctgcgtaatggcgctgatgctggtattgaaaatcgtcacctgggatgacgtgattaagaataaaggaggatggaatacgctcatctggtacgggggtattattggtttaagctcattgctctctaaggttggatttttcgtatggcttgcagaggcgcttaaaaataatatttcctttgatggccacggcaatgtcgcttttattgtgattgtcgcactgagcatactggttcgttatttcttcgcgtcagggagtgcttatattgtcgccatggtaccggtctttgccatgctggcgaatgtttctggcgcaccgataatgctcaccgcgctcgcgctattattcagcaactcttatgggggcatggtaacccactacggcggtgcggctgggccagttatttttggcgttggctataatgatatcaaatcatggtggattattggtgggatattagcattgctgacttttattctgcaaatcacccttggggtatggtggtgggagatgttaatcgcctggggggtaatttaaataatctttaaggagatgaaggtttgcccgggcatcctctgatgcccgggggtaagtcctcttattaagaaaacatagccttttagcaaggtgaggtgcgatatatttatgtctccagttacgattacgttgtcgctattggttttttctattgtcatgtttgtttgggaaaaaatacctttagcggtaacggccatgattgtttgtattactctggtggtgaccggggtttttgatgtcaaaacggcttttgccggttttattaatcaaaatgtgattttgtttgtggctatgtttgtggttggcggcgccttattcgaaaccggggtgacggataaaattggtagtatggttacacgctacgccaggacagaaaagcagctgatagtcgtcattatgctggtctgcggaacgctttccgggctgctatccaataccggcacggcggcggtcctcattcctgtggtgattggcgcagcgatgaaatcaggatatgcccggtcgcgcttgcttatgccgctggcttttgcctcggcgctggggggaaatttatcgctgatcggctcacccggcaatcttatcgcgcagtcggcgctggagcaggttggtcaacgcttcgggttttttgaatatgctaagttaggcattccgatgctggcctgcggcatactctattttgtgacgatcggctatcgcatattgccaaaaacgaatgcggcccagcgtcaaagtgttaataatattaaagcgcaggcatgcccgaaatataagcaggtgattgcgctatcggtattaatcctgaccgtactgggcatgatttttgagaaacagattggtttgccgattgcgatcgtcggttcaattggcgcattgtcgttgattgtgacccgggtcattacggaaaaacaggcttaccaggctatcgactcgcagacgattttcctcttcggcggcactctggcattagcaaaagcgctggaaaccaccggcgctggcgccattatggcgcgctcaattatcgcgttattaggccagcaggcgtcgcctttcttacttctgagcgccgtattgataatctcctgcgcgttaaccaatttcatgtcgaatacggcaaccgccgctttattaatgccgattggcctgtctattgctcattctatgggcgccgatccccgggcggtgttaatggcgattgttatcggctgttcatgtgcttacgcaacgccggtgggcaccccggctaatatgatgattttttccgcgggtggccacaaatttgtcgattacgttaaggttggattgccgcttattttgatatcggtcattgtcagctttattttgctgcctgttttcttcccattttattaatcgcggtcagccatttttatcgaatggctaatgtcaggcgtgttttttcaacatctaaggatatatgtgatgattaaattgtatgaccacggagtctatatatcacatcagcacggtattattgccgctgataaggggtcagtcgcgttagagaagcatgaggcgcgcaagggaacgatctcgtggtcgatcctctccgcccataatacttcagggaatgaacagcagttaaaaattaaatttgattcaatggcctcccacgatattacttttgtgggcatcatccagactgctaaggcctcgggaatggaacgttttccattaccctatgttctgacgaattgccataattcgctttgcgctgtcggcggcactatcaacagcgacgatcatatatttggtttgtcctcagcgcaaaaatatggcggtatttatgtcccgccccatatctcagttattcatcaatatatgcgcgagatgatggccggcggtgggaaaatgatcctgggctcagacagccatacgcgctatggcgctttagggaccatggcggttggcgaggggggcggcgagttggttaagcaactgctcggagagacctgggatattgattatcctgagattgtcgccgtgtatttgacagggaaaccctcgcccggcgttggccctcaggatattgccctggcgataattggcgcggtgttcgagcgcggttatgtgaaaaataaagttatggagtttgtggggcctggggtggcgacaatgtctaccgacttcaggaatagcgtagatgtgatgaccacggagaccacctgtttatcgtccatctggcaaacggatgaagagacaaaaaactacctgcgtattcacggcagggaacaagactattgtccgctctcagcaaaagagatggcctactatgatggctgcatagaagtgaatttaagcaccatcaagccgatgatcgccttgccttttcaccctgccaacgtatatgaaattgatacgcttaatgagaatttgcaggatattttgcacgaggttgagattgcggcggataacatttcccagggacgcgccaggctctccctgctggataaagtcgaacatggaaagctgcggattcagcaggggatcatcgctggctgcgctggcggaaattatgttaacgtggtcgaagcggctcatgccttgaaaaatcacgcctgcggcgatagcgctttctctctcgcgatatacccctcttcccagccggtgttgatggacctgactaaaaagggcatgaccaccgcgttattgagcgccggcgcaattatgcgtaccgcattttgcggcccctgcttcggcgcaggcgacacgcccatgcataatggactgagcattcgccacacgacgcgtaattttcccaaccgggaagggtccaaacccgggaatgggcaaatgtcggccgttgcgctgatggatgcccgctccatagcggcgacggctgccaatgggggcgtgctgacatcggcttccgcgctcgattgctgggaagacattccgcagtatgaatttgatgcttcaccttatcggagccgtgtttatcaagggtttattaaaggagcgtcccgccaatcgctgatctacggccccaatataaaagattggccggagatgagtgagctgacggacaatattttgttaaacgtgacctcaaaaatcatggatccggtgaccaccaccgatgaactgattccatcaggcgaaacctcatcatttcgctccaatccgttagggctggctgagtttaccctttcgcgacgcgatccgggctatgtcggccgtagtaagaagattgcggcgctggaaaaattacggatcgagggggacgatccttgtcgtctggagccgcagcttgaggcggttttttcccggatccgccaacttccggggcaggaaaatgtcacgcttgagcagacggagattggcagcatggtttatgcggtcaaacccggcgatggttccgcacgagagcaagccgccagctgccagagagtccttggtggcctggcaaatattgcccagcagtatgccacgaagcgctatcgttcgaacgtgattaactggggaatgctgccattgcagatgaaggcgctgccggagtttgaggtcggcgacttcatctatatcccggggatcaggtcagccctggaaaccgatctgcgtcagattaccgcgttcgtgatcggccacgatcgccccattaaagagatctctctttacatggaggggctcacctcagcagagcgggagataattaaggcgggaagcctgattaattataataaattacgcttaacaacccaccatcagtaaacgatattgatcatcaagatgaatcaacgggggtgatatcgcatcctcgtttttattcatagccgcttattccgtggttttcgatcgcggcgttagggctgggctacctgaagccggcttcatcttctcgctaagataatcaatcatcgcccgcattctggcgggcatatgcttattgcccgaccacagtagccagagctggccggaatagcggctgataaactcccactccggtaaaacctgcacaatctcgccgcgcgccagcgcctcacgggcggtaaacagcggcaggctgccgatgcccagattctgcttcacggcatcgaggcgcacggcggtatggttggcggcgtagcggccgtgagtctgaattgtttccgttttccccccgcggcggaacttccagcgcgaatcggcgggcgtctcgccaaggctgatacagctatgttcgcgcagatcctgcggcgtttgcggcgttccatagtgctccagatagccgggcgtcgcgcagatgacgtggctgatggtcatcaaaggcttaccgtgcagccccggcgagggggtagtggtgatacgcagcgccagatcgatgccgtcatcaataaaatcgagaacccgatcctcaagccgcagacagacgtcgatcttcgggtagcggttaaaaaattccagcatcagcgggtgaatggcaaaccgtcccacggctttcggcacgctgagcgtgagcttgccctgcgccaccgcctgggtactgctggcggagtccatggccagacgcgccgattccagcatctccagcgcatgttcatacaccattttcccggcatcgctgaggcgcagcttgcgcgtggtgcggtgcagcagcttgcagcccatctcctgctccaggcgcgagacgctgcggctgatcgccgaaggcgttgcgccagcctggcgtgcgacggcggagaagctgccctgttccacaatctgtacgaacagggcgaggtcgggcagtaggctcagattcatttgtgcttccgaagcaaaattgcgttgatgtcaggcgggattatcgccgccagcaatatcaatatactgtcctgacagagaggaggacaaccatgactgaacgcctttattacaccagcgacgccgaggaatgccttgcgcaagtcgtcaactgcctgagcgaagccgatggccgctatgccattgagctggatcgcacgctgtttcacccgcagggcggcgggcagccggcggatcgcggctggattgccggcctcgccgtcgagggcgtggttagccgcggcgatagcgtggcgcatatcgtttcacagccgctgccggccggcgaggtcacgatccgcatcgatccagagagccgacggctgcacgcgcgtctgcactccgccgggcacgcgcttgcccaggccggggagctgtcgggctggcagccgatcaaaggacatcactggccgggagaaagccgtattatttttgccccaggcgcgcatggcgggctgcccgaggccagcgcgctgctggaaaaagttgaggcctggcaggcagacaatttaccgcgtcagcttacttttgccgatggcctgcgcaaggtcgggttcggcgacatgcagagctatccctgcggcgggacgcacgtggccagcctgtccgaactgggtaaagtcgtcatttcccaggtgaagatgaaaaaagggcaaattattgtcagctacacggtggaataagcgagtgaaaaggagatgcacactcaacagggcatctcccggtgcttaaatatgcgcaggatgtttaccgtgataaatccgctccggtctgccgactttgccatagctgatttcagcctcaaggaaatcgtttttaacgccctgctcaaggtagcggcgggcggtggttttactactgccgagaatacgggccagggtgtctgcggtatggaccgtttccgggtcggcaaagagctgtaatacccgattaaaggtgctctcatcaataccccgcagcggagagcctgcggcttccgcgtgctcttttgcctggatattgaacagggcgtcaacatgggtctggcttgcctgctcgcttgagcgaagagagctgcgatagcgggcaaaacgctcaagcgtatgctgcaggcgctgatagtgaacgggtttaatcaggtaatcaaaaacgcccatccgcagggcttcgctgatggtatccatatggttgtcggcggtgatgaaaatgatgcgccctttataatgagtattgacggcgtggcggatcaaatcgagtcctttgccatcgggtaagaagttatccagcagggtgagctggggctgatagaggcgaagcatcttttttgcgctttccagtttatccgcaatgccaatgacttcgaactggggaaattgcttgatggtatccaccagaatttccgccagcataggttcgtcttcaacgatgagagtggtgatgctatccatggtgttcatctcgggtcagggggatataaagggtaaaaatagtgccaaaagggatgttgtcatcgacgacgatattgccgcccgcctgctcaacgtagctgcgaaccagccagagtccgatgccgtgatcgccgctgtcgctgctggtcacgccgcgctcaaaaatacgatcgcgcagcgattcctcaatcccgcagccctggtcggcgatctcgacgatcgcttcgccgccctcgctgttgatcaggcattcgatctgctttgaacctgccggctgacgtagggcagcgttgtaggcgttatccaacaaattgccgacgatcgagatccattcattatgcgacagcgaagaggggagagtttcaacgtggcaggcgggatcgaagaccagctctaatccgagctctttggcgcggtaatatttgccgatcagcagcccggcaaggtggttcactttaaaattgcgggcaataaaatcgagcactttctggtggctctcagactgctgctgaataagatccagcgcgttatcgtagcgttttaaaaacagcagcccggcaatggtggagatcagattgcgatgctcgtgctgtacggcacgcaggttatccgcgtactgctggacctggctgagctgcaggctcagagtgttgatatcgtctttactgcgaaagctaatgacccagccctggggctcgttattaagcgtgacggccatacggctggcgatcactttaatctgattaaaagtgacgatttcgtcttttttatttgtctgcggcgcgtcatagaagaatgcctcctgagagatcacgctgctgatgcttttgccaatcagaatggtttccggctggctcaggtttaatagcctccttgcggtttgattgatggcggtaattcggtagtgggagtcaatggctatcagcccctcaaagaccgattcaaacaggacgctctgctggataagcagctgtgagagctgctgtggttccatattcagcatctgttttttgatatgcagcgagaagcgccgggcgcagtagagcagcagaagcagcatgatcgccatcgggatcatcagcgatccgatttgcagactcagccagttttctaactgttcgatggtgtagcccaccgatacaataccgatcaccttcccggtgctgtcctggatcggcgacttgccgcgtaatgacgaaccgagcgatcctttacgcaccgacacgtagcttttggcgttatacagcgcctcgtcgctgtctccgccttccatcgatttaccgatttcctctggattcacgtgatacaggcgcctgcctttcgcgtcaccgacggtgatataggtggcgtcggaaaacgatcgcatcgggtcgataagttctttaatgcgcggtaaatcgtgcttttctaccgcgtcaaccagttcaggcatggcggagatctgcatggcctgaatcagcgcgcgctgtcccacctggtaatgcaggcgttcctccgtaatgctggtgagataccatgacatggccagcatcacgattgtcgaggtaaacaggatcaacaggaagatgcggttctgaaacgaacgtcgggcaaaccagtgcgtgatttttcgggcaaacattgggcgaattgacatcaaaaggtcattttctcttttttaggggccgacggcgctgaatcggcccacagatttactgatttcagaacacatccagtaggaatacgacgttttacgtaccacccgatcgggcttttgcgccgtagcctggggtatttcccggaggcggcgcgcggcgcccgtccgggcgggtagcccggctaagcgcagcgcgagccgggaacaacacgtttttacatcgccagcacgtacttgagcatcaccccggcggcaatcgccgagccaatcacccccgccacgttcgggcccatcgcgtgcatcagcaggaagttctgcgcgtccgactccagacccaccttgtttgacaccctggccgccatcggcaccgccgacaccccggccgagccaatcagcgggttgattttgttccggctgcacaggttcagcagctttgccatcagcacccccgccgccgtccccacgcagaacgcaatcacccccagcaccagtatccccagcgtctgcggctgcaggaacttgtccgccaccagcttggcccccaccgacagcccgaggaaaatggtcacgatatttatcagcccgttctgcaccgtgtcgctcaggcgctccaccaccccgctctcgcgcatcaggttgccgaagcagaacatccccagcagcggcgccgcgtccggcagcagcagcgccaccagcagcagcagcaccgccggaaagaggattttttcccgcttactcaccgtgcgcagctgcaccatgcggattttccgctccttctcgctggtcagcgccttcataatcggcggctggattaacggcaccagcgccatatacgagtacgccgccaccgcgatggccccgagtaattccggcgccagcttgcccgacagataaatcgccgtcgggccgtccgcgccgccgatgatgccgatggccgccgcctgcggcagggtgaagctgatgatgccgaagtagttcagcgtcagcgcccccagcaccgtggcgaagatgccgaactgcgccgccgcccccagcagcagggtgcgcgggttggccagcagcgggccgaagtcggtcatcgccccgacgcccataaaaatcaccagcggagcgatacccgagccgatggcgaccttatagaagatggccagcaccccggcggagtagcccatatccacggcgagctcctccatctgcccctgcaccgacggcagggccagcgccagcgcctccctgatggcgtggacatccggcgtacagtggagcttcgcggcaatcaccgccagctgcccggcgtcgtggtgggccagcaggctctccagggcggtcagcgccagcccggcctccgggatattcgacagcaggccgccgaagccaatcggcagcagcagcagcggctcgaacttcctcgcgatggccagccacagcagcagcaggctcaccagcagcatgacggcctggccggcgccgaggtgcatcagccccatgccctgaatcagggcgttcagactttccatttcgcgtcctcttccttacgccaggctcagcagggtgtcgcccaccgccaccgcgtccccggatttcaccgcgataccgcgcacggtcccggcctgcgcggcgcggatttcggtttccatcttcatggcttccagaatcagcagcacgtcgccctcggccaccgcctggccctcgccggcgatgactttccagatggtgcccgccagcggcgcggtcaccggggtgccggcacctgccggggcggctgcgggggccgtggcctgaacgggggccgctgccgtcagcgggctgatatcgccgccgtcgctgaccttcaccacaaaggccttgccttccacttccacggtgtagacgccggaggcggccggtttctctgctttcaccgccggtttgacctcttcagcctgcggtaccggctcaaaggccgccgggttgtggcggttctcaaggaacttcaggccgacctgcgggaacagggccacggtgagcacgtcgtcgatggcgttgtcggcaagctgaatattcttctcctgcgcctggcgcttcacgtcggcttccagatgcgccagctccggcttcagcaggtccgccggacggcaggtgatggcctctgctccgtccagcacgcgcgcctgtaatgccgcgttcaccggcaccggggtgtggccgtactcgcccttcagtatcccggcggtctccttcgcgatggttctgtagcgttcgccggtcagcacgttaagcaccgcctgggtgccgacaatctgcgaagtcggagtgaccagcgggataaagccgaggtcctcgcgcacgcgggggatttccgccagcacctcatccagacggtgggcggcgttctgctgcttcagctgcccctcgaggttggtgagcatcccgcccggcacctgggccacgaggatacggctgtcggtgcccttcagctggccttcaaaggcgtggtatttcctgcgcacctcgcggaagtacgccgcgatgctctcaagcttcaggatatccagcccggtgtcatgttttgtgcctgccagcgtcgccaccagcgcctcggtggccgggtggccgtaggtggcgctcatggaagagatggcggtatcgacgccgtcgacgccggcctcgatggccttcagcagggccatctccgccatcccggtggtggcatgagcatgcaggtgcagcctgacgtcatagcgctttttgatttcgctcaccagctcgaaggccgccatcggggtgagaatgccggacatgtccttaatcgcgatggaatcgacgccggtctccagcagctgttcggtcaggtcgagccaggtctgcagggtgtgggccggactggtggtgtaggagagcgtgccctgggcgtgggcgccgtggctgcgcaccgcctgcagggcggcctgcatattgcgcgggtcgttcatggcgtcgaagacgcggaacacgtccatgccgtttttgacggcgcgctcgacgaagcgctgcaccacgtcatcggcgtagtggcggtagccgagcaggttctggccgcggagcagcatctgcagcggggtcttcggcatggcctttttgagctcgcgcaggcggacccaggggtcctcgccgaggaagcggatgcaggcgtcaaaggtggcgccgccccagcattcaagggaccagtagcccgcgtcatcgagggcggccgcaacggggagcatatcgtcgaggcgcaggcgggtggcgaaaagggactggtgggcgtcgcgcaggacgacatcggtaatggcaacggtcatggattcctccgtgaattaagggttaagtcggcgatggtggtggatagcggcggcaatcaccggcgccaggcgggcgaagtcgtcagcgggcgctacggcggcgggtgcggccttcggcgcgggagccggttcggggaagaagcggttgacggcggcggacatgccgcggatggcgaaaatcagcagaaacagaaacgccagcacgaaccccatgccgaggaacatcagggtgaagccttcacccagcagaactgcatcactcatgaaaagatccaaaagtaagggcacgatggcgtgcctgaaggctaaccaaacgatacttccggctaaggagtagggtggatttcccgaagccgcccccggctctggaccctaaaaagcaccgctgtggttgacgctcaaacatcgccatcgtgcgtgttggttacatcatcatgccgaacacgatgctggcgatgaccagcacaataccgccgcccagacgggaggagatttgcgcataagagataagattcatacggttacaggccgagagcacttccaggtcgcccgagccgccgcggttggccatgcacagaccggcggtgatcgcggactcaatcgggaagaagccaatcatccagccgccgacggctgcgccgacgaccgcacccaccacgatcaccgccgcgatgatgacgttcgcgaaggtaatcgcgtcgataatttcctgcaggtcggtgtagcacacgccgacgccgaccatcagtacccacagcagctgcttagagaagaagtcagacaggcgtttggccccggctttgatctccggcgagcagaggccggaagcgttcagcgccgcgacgatcagcaccatccaggcgaaatagtggatagagacgccgccaatgcttggcaaaattttcttggcaataacgtaggccagcaggaaacaggtggtggcgagcaccaggccgacggcggtttcgcgatgggtaatctggcccgctttttcatcgtcgtcgactttaaaggaggctttacgcaccagttcgccttcaccgctcagcctggtgtgttttttaccgataatatcgaggagtgcagcaaagacgatggcaaagatgttggcgatggtcaggatagcaatcgcggtggagtagtactcttcacgcgaacggccggtgacggagtgataaatttcagacagcggcaccgcgcccgcgccgttgccgccgcccataatcggcaggacgtacagcatcatgatgcggtcgatggagataccgaagcacaggccaatgataatcccgaagatggatgcgccgaggatccccattaaaatggtcggaatataacccagcagagatttcagcagcagcttacggttaaccgagaggattgcgccggtaatcaatactgcgatgaataagttcaggaagttacttttatccatcacattagtgatcgcatcaatttctttctgggtgaaaatgccggcgtaaacgaaataggcggccacgaggaagatcatcaccggcgcgccgccaatatatttattgaagattggcaggcgtttgccaatttcgccaaaaacggcgccaataataaacatgatcgcaaagccaccaacaatgtcggtcggcagggcattataaaagtgtgaaagtagtaaagtgattaacgcaaaggcgtaaagcggtagcggcatgccgaagattttaaaccccagaatatcgctaaccccttttttctccgcagatggagcctggctcatattagtcatatgacgtcaccctgttaaaaaaaggaatatacacatcatccttcaagctgcctctttgttggcagccttcactcaccccagtcacttactatgcgtaagctcctggggattcattcagttaccgcctcgatgcaacttgaatgattttgtgtattaatgccgttagaaaaaacaataataggacggcggcataataataaatatgttccccggcgatatgtgattatcttcactgattagtcgtgtttttaattaatttaattgtttttattctgctgaattaattaacaacataaaaaccataaagccaattaaggtacgcggaaaaatgtgattgaaataaaagaaccgctgcgggaacgatggcgaaatacagctcgttttggtcaatgaagcgcgaaaaaaatgaatctgatagtaaaacgcgtcgcggtacagctcgacccacggcggcgagaggccgttgacctctttcttcatcagcaccagctcacgctggaggcggactgcgaatgggcgattatcgtcgagtaccagcggcgcattgtcggctgcggcgccattgccggatgcgtcctgaagtgtattgccgtcgacccgtcgctgcagggggaagggctcagcctgaagctgctgactgaactgatgaccctggcgtatgagctgggccgcagcgaactgtttctgttcactaaaccctataacgcggcgctcttctcctgcgccgggttctggcctatcgcccgcgcgggggagcaggccgtgttaatggaaaatagccgcgaacgtctggcccgctattgccgccagcttacgatgtatcgtcagcccggcgaaaaaatcggcgccatcgtgatgaacgccaatccctttaccctggggcatcgttggctggtggagcaggcggctcaacgctgcaactggctgcatctgttcgtggtgaaggaggatgcttcgtttttccgctaccgcgatcgcgtggcgctgattgaacaggggatcgccgggatcgccaacgtgaccctgcatccgggatcggcctatctgatctcgcgcgccacttttcccggctacttccttaaagacaaaggcgtggttgacgattgccacagccagatcgatctgcagctctttcgcgaacgtttagctccggcgctgggcgtgacccaccgctttgtcggcagcgaaccgctgtgtgaattaacccgtcgctacaaccagcgcatgcgccagctgctggaagcgcccggcgacgcgccggcgattcaggtggttgagctggcgcgggttgagaaagagggcgcgcccatttccgcttcccgggtgcgcaggctgtatcagcagcgccagtggtcgtcgattgcgccgctggtgccgccgggaaccctctcttttctgatgcatctggcggaaagcgaacaccaaaccgcctgatttacctccataactaaggatcagcctctatggaaatgatgattgacgccctggccggcacgctggaatccagcgatgtgatggtcaggatcgggcctgcgaatgagccaggtattcagcttgaaatcgacagcattgtgaagcagcagtttggcgcggcgattgagcgggtggtcagagagacgctgacgcagcttggcgttacccgggcgaacgtcgtcgtcgatgataaaggcgcgctcgaatgcgtactgaaggctcgggttcaggccgcggcgctgcgcgcggcgcaacaatctcaaccgcactggagtcagctatgaaacctcgtcgcagtatgctgtttatccccggcgccaacgccgcgatgttaagcacctcatttgtttacggcgctgacgcggtgatgttcgacctcgaagatgctgtctcgctccgtgaaaaagataccgcccgcctgctggtgcatcatgcgctacagcatccgctctaccgggacgtggaaaccgtggtgcgcattaacccgctcagcacgccgtttggtctcgccgaccttgaggcggtggtgcgcgcgggcgtcgatatggtgcgcctgcccaaaaccgatagcaaagaagatatccatgagctggaagcgcacgtcgagcggattgagcgcgaatgcggccgggaagtgggcagcacgaaattaatggcggcgatagagtcggcgctgggcgtagtgaacgcggttgagatcgctcgcgccagcccgcgcctgtcggccatcgcgctggcggccttcgattacgttatggatatgggcaccagccgcggcgatggcaccgaactgttttacgcccgctgcgcggtgctgcacgcggcgcgcgtcgccgggatcgcggcgtacgacgtggtgtggtcggatattaacaatgaagagggtttcctcgcggaagcgaatctggcgaagaatcttggctttaacggtaaatcgctggtcaacccgcgccagattgagctgctgcaccaggtttatgcccccacgctgaaagacgttgaacatgcgcgggaggtgatcgcggcggcggaagaggcggaagcgcgcggtctgggcgtggtatcgctgaacggcaagatgatagatggaccgattatcgatcatgcgcgcaaagtcgtggcgctgtcggcttccggcattcgtgattaaggagtaaataatgaaagagaccgtagcaatgcttaatcagcagtacgtgatgccggaaggattagcgccctatgcgggcgtgacggcgcagagcccgtggctggccagcgaaagcgaaaagcggcagcgtaaaatctgcgcctcgctggaggaggcgattcgccgttccgggctgcaaaacggtatgaccatctccttccatcacgcgtttcgcggcggcgacaaggtggtcaatatggtggtggcgaagctggctgaaatgggttttcgcgatctgacgctggcctcaagctcgctgatcgacgcccactggccgctgattgaacatattaagaatggcgtgatccgccagatttacacctccggtctgcgcgggaagctgggggaagcgatctccgccgggctgatggaaaacccggtacaaatccactctcacggcggccgggcgcatttagtgcaaaccggtgagctacgcattgatgtggcgttcctcggcgtgccgtgctgcgatgagtatggcaacgccaacggctttagcggtaaatcccgctgcggatcgctgggctacgccagagtggatgccgaggccgccggatgcgtggtgctgctcaccgaagagtgggtggattatccaaactatccggccagcatcgcccaggatcgggtcgatctgatcgtgcaggtcgacgaggtcggcgatccggcgaaaatcaccgccggggcgatccgtttgaccagcaacccgcgcgaactgctgatcgcccgccaggcggcgaaggtgatcgaacactctggctatttcaaagacggtttctcattgcagacggggaccggcggcgcatcgctggcggtgacccgcttcctcgaagataagatgcgtcgtaacaatattaccgccagctttggtctgggcgggatcaccggcacgatggtcgatctgcacgaaaagggtctgatcaaagcgctgctggatacccagtcttttgacggcgatgccgcgcgttcgctggccaataaccctaaccatattgaaatttccgctaatcagtacgccaatcccggttcgaaaggcgtctcctgcgaacgcctgaacgtggtgatgctgagcgcgctggagatcgataccggattcaacgttaacgtgatgaccggctccaacggcgtgctgcgcggggcatccggcggccacagcgatacggcggcaggcgcggatttaaccattatcaccgcgccgctggtgcgtgggcgtattccgtgcgtggtggagaaggtgctgactcgcgtgacgccgggcgccagcgtggatgtgctggtcaccgatcacggtatcgccgtcaacccggcgcgtcaggacctgattgataacctgcgtaacgcgggtatcccgctgatgaccattgaagagctgcagcagcgcgccgaactgttgaccggcacgcctgacccgatcgaattcaccgatcgggtggtggccgtggtgcgctatcgcgacggttcagtgattgatgtcattcatcaggtcaaaagcgccggttaaacgcgctgaggagaaaggcatgagcgaagtgatgataagccagcgtcgcccgttgagccgtcaaacggtgacggcggaggagatggtttctcgcgtggaacgagcgctgctgaccgaagtccgcctgacgccgaaaccgggcctggtggatattcgtaacgccggcgcgcatcgggatatggatctggcctcctttgaggccagcacggcggctgtcgcgccatggatggagaagtttttcattatgggccacgacacggccaatatcacgccggagcaggtattgacgatgctgcgtccggtgggcatggcgtgcgagacggatatgctggaggctaccggcggggtgaatacccatcgcggcgcgatcttcgcttttggcctgctcagcgcggcggcgggaaggctggtggccagaggggagccggttgaacagcaccgggtttgcgatcgggtggcccgcttctgccgcggcctggtcgggcgcgagctctcctctccagaaggaatgaaggtcagtaaaggcgaagggcatttcctgcgctacgggctctccggcgccagaggcgaagcggaaagcggctttcgcaccgtgcgcactcaggcgatgccggtcttcaatcgcgttatggcggacaccggcgataccaatctggcgttactgcagactctgctgcacctgatggcctggaatgacgataccaatctggtgtcgcgcggcgggctggaagggctcaattttgtgcagcagcaggcgcaaaagctgctgtgggaaggcggggtgctgtccgacggcgggatggacgcgctgcgccggctggatgatgagctgattattcgccaccttagcccgggcggcagcgccgacctgctggcggtcacctggttcctgtccggtttcccggccggcgagctgttcctgcactaatcgctgcttttctgtcgccgtattccccggattggccatacagggccaatccggggttgcggactgcgcgcgctcctcgcttctcactactccacggcaaattcccggcacaatcttatagtttttactgatatcggcggcagtttgtcataaatttctaattatcggtgtttttgagtagcggctcatcgttgggctggttactctgaaaacaatttacgtagtgttaacaaaagagaatagctatgcatgatgcacaaatccgcgtggccatcgcgggcgcgggcggccggatgggacgccagttaattcaggcggtacagcagatggacggcgcggcgcttggcgcggcgctggagcgcgaaggttcctcgctgctcggcagcgatgcgggcgagctggcgggcgcgggcaggtcaggggtggtggtgcaaagcagccttgaggcggtaaaagacgattttgacgttttcatcgattttacccgcccggaaggcacgctggcccatcttgcgttttgccgtcaacacggcaaaggcatggttatcggcaccaccggctttgacgacgccgggaagcaggcgattcgcgacgcttcgcaggagatcgccatcgtgtttgccgccaacttcagcgtcggcgtcaacgtgatgcttaagctgctggaaaaggcggcgaaggtgatgggcgactataccgatattgagattatcgaagcgcatcatcgtcacaaagtcgacgcgccatcgggtacggcgctggcgatgggcgaggcgattgccggagccctggataaagatctgaaagcgtgtgcggtctacagtcgcgaaggctataccggcgaacgcgttcccggcaccatcggctttgcgaccgtgcgcgccggggatatcgtcggcgaacatacggcgatgtttgcggatatcggcgaacgtattgagatcagccataaggcttccagccgaatgacttttgcaaatggtgccgttcgttccgctttatggataaaaggcaagaaaaacggtctttttgatatgcgtgatgtgcttgagttgaactctttataacgattattacccatcgtgatgtggttattgctttcaataagtaattgattgcaaggggcaatgtcttattgcccttttttatttttggcgtttaatcgattttttatcgccaggcctgaaaaatactatcttatccgccttatttttgttgttttattgtaaattttgaccatctggtctactttttcaatccctgcccggcgattttacaaacatcctcctccgcaagcgttttcccgggcgagttaggtgatctttttgcccgttaaggcaggtattgctgaatagtggcctgaaacaagattaaaaatatccgctttaagttgacttttatccgccatctctccagaatgccgccgtttgccaaaattctgcgggcaacagatttgcattgattcagatctacattatgaattaatatgcaaataaagtgagtggatattctctggagggtgttttgattaagtcagcgctattggttctggaagacggaacccagtttcacggtcgggccattggggctaccggcacggcggttggggaagtcgttttcaatacttcaatgaccggttatcaagaaatcctcactgatccttcctattcccgccaaatcgtcactctaacttatccccatatcggcaacgtcggcaccaatgccgccgatgaagaagcttctcaggtacatgcgcagggtctggtcattcgcgatctgccgctgattgccagcaacttccgcaataccgaagacctctcttcttatctgaagcgccacaatatcgtggcgattgccgatatcgatacccgtaagctgacccgcctgctgcgcgaaaaaggcgcgcagaacggctgcatcatcgccggcgatagcccggatgcgcagctggcgctggaaaaagcgaaagcgttcccgggcctcaacggcatggatctggcgaaggaagtgaccaccgcagaaacctacagctggacgcaggggagctggacgctggcgggcgacctgccggaagccaaagcggaaagcgagctgccgttccacgtggtggcctacgatttcggcgccaagcgcaacatcctgcgcatgctggtcgatcgcggctgccgtctgacggtggtgccggcaaagacctccgctgaagaggtgctgaaaatgaatccggacggtatcttcctgtccaacggtcccggcgatccggcgccctgcgactacgctatcgcagcgattgagaagttcctggagaccgatattccggtattcggcatctgcctcggccaccagctgctggctctggcgagcggcgcgaagaccgtgaagatgaagttcggccaccacggcggcaaccatccggtaaaagatattgataacaacgtggtgatgatcaccgcgcagaaccacggctttgcggtggatgaggcgtctatgcccgcccacctgcgcgtgacccacaagtcgctgttcgacggcaccctgcaggggattcaccgtaccgataaaccggcgttcagcttccagggacatccggaggcgagccctggcccgcacgatgccgcaccgctgttcgaccattttatcgaattaattgagcagtaccgtcagtccgcgaaataatcaggagttaagagagccatgccaaaacgtacagatataaaaagcatcctgattctgggcgcgggcccgattgttatcggtcaggcgtgtgagtttgactactccggcgcccaggcgtgtaaagcgctgcgcgaagagggctaccgcgttattctggtgaactctaacccggccactatcatgaccgacccggaaatggctgatgccacctacatcgagccgattcactgggaagtggtgcgcaagatcatcgagaaagagcgtccggatgcggttctgccgaccatgggcggccagacggcgctgaactgcgcgctggagctggagcgtcagggcgtgcttgaagagttcggcgtgaccatgattggcgcgaccgccgacgcgattgataaagccgaagaccgtcgccgtttcgacgtggcgatgaagaaaatcggtctcgataccgcgcgttccggtatcgcgcataccatggaagaagcgctggcggttgccgctgaagttggcttcccgtgcatcatccgtccgtcctttacgatgggcggcaccggcggcggtatcgcctacaaccgcgaagagttcgaagagatctgcgaacgcggtctggatctctccccgaccaacgagctgctgattgatgaatcgctgatcggctggaaagagtacgagatggaagtagtgcgtgataaaaacgacaactgcatcatcgtctgctccatcgaaaacttcgacgcgatgggcatccacaccggcgactccatcaccgtggcgccggcgcagaccctgaccgacaaagagtaccaaatcatgcgtaacgcttcgatggcggtactgcgtgaaatcggcgtagaaaccggcggctccaacgttcagttctcggtgaacccgaaagatggtcgcctgatcgttatcgaaatgaacccgcgcgtctcccgctcctcggcgctggcctcgaaagccaccggcttcccgatcgctaaagtggcggcgaagctggcggttggttacacccttgatgagctgatgaacgatatcaccggcggccgcaccccggcgtcgtttgagccgtccatcgactacgtcgtgaccaaaatcccacgcttcaactttgaaaaattcgtcggcgcgaacgaccgtctgaccacccagatgaagtcggtgggcgaagtgatggcgattggccgtacccagcaggagtccctgcagaaagcgctgcgcggcctggaagtgggcgctaccggtttcgacccgaaagtgagcctcgatgacccggaagcgctgaccaagattcgccgcgagctgaaagacgcgggcgctgagcgtatctggtacatcgctgacgctttccgcgcgggcctctccgttgatggcgtattcaacctgaccaatatcgaccgctggttcctggtgcagattgaagagctggtgcgtctggaagagaaagtggctgaagtcggtattaccggcctcgacgccgacttcctgcgtcagctcaagcgtaaaggctttgccgatgcgcgtctggcgaagctggctggcgtgcgcgaagcggaaatccgcaagctgcgcgaccagtatgacctgcacccggtctacaagcgcgtggatacctgcgcggcggaattcgctaccgacaccgcctacatgtactccacttatgaagacgagtgcgaagccaacccgtccgttgaccgcgacaaaatcatggtgctcggcggcggcccgaaccgtatcggccagggcatcgagttcgactactgctgcgtccatgcctccctggcgctgcgcgaagacggctacgagaccattatggtcaactgtaacccggaaaccgtctctaccgactacgacacctccgaccgcctctactttgagccggtgacgctggaagacgtgctggaaatcgtgcgcattgagaaaccgaaaggcgttatcgtgcagtacggcggccagacgccgctgaagctggcgcgcgcgctggaagcggcaggcgtgccggttatcggcaccagcccggatgccatcgaccgtgcggaagaccgcgagcgcttccagcacgcggttgaccgcctgaagctgaagcagccggcgaacgccaccgtgaccgcgatcgaaatggcggtcgaaaaggcgaaagagattggctacccgctggtggtgcgtccgtcctacgttctcggcggccgcgcgatggaaatcgtctacgacgaaatcgacctgcgtcgctacttccagactgccgtcagcgtctctaacgatgcgccggtgctgctggaccgcttccttgacgatgcggttgaagtcgacgtcgatgcgatctgcgacggcgaaatggtgctgattggcggcatcatggagcatattgagcaggcgggcgtgcactccggcgactccgcgtgttcgctgccggcttacactctgagccaggaaattcaggacgtgatgcgcgagcaggtgcagaagctggcctttgagctgcaggtgcgcggcctgatgaacgtgcagtttgcggtcaaaaacaacgaagtctacctgattgaagtcaacccgcgcgcggcgcgtaccgtcccgttcgtctcgaaagccaccggcgtaccgctggcgaaagtcgcggcgcgcgtgatggcgggcaaaacgctggctcagcagggcgtcacgaaagagatcatcccaccgtactattcggtgaaagaggtggtgctgccgtttaacaaattcccgggcgtcgacccgctgttagggccagaaatgcgctctaccggtgaagtcatgggcgtaggccgcaccttcgcggaagcgttcgccaaggcgcagctgggcagcaactcgacgatgaagaaacagggacgcgcgctgctctccgttcgcgaaggcgacaaagagcgcgtggtggatctggcggcaaaactgctgaagtttggtttcgagctggatgcgacccacggtaccgcgattgtgctgggcgaagccggcatcaacccgcgtctggtgaacaaggtgcatgaaggccgtccgcacattcaggaccgcatcaagaatggcgaatacacctacatcatcaacaccaccgcgggccgccaggcgattgaagactccaagctgattcgccgcagcgccctgcagtacaaagtgcactacgacaccacgctgaacggtggtttcgcgaccgcaatggcgctgaatgccaacgcgatggaaaaagtgacctcggtgcaggaaatgcacgcgcagattaaaaagtaatattatctgccagtaaaagcgcctccggtggccacgccggaggcgcttttttttgcgtgacgataagcctgggcggaataaagtgacgctcccctcggcgctgaacgtcgaacaaaaacagggggatcggcgttaacaggccacttcggagagttctggttttctctcgccggacagtcagctagcctaaagtggttagggtgataatgaatatgacttagagcctatcccagtaggcgttattggcgcagccagtttggatacggacagcgcggagaaaccggagcgtacacgtagtacgtgaggatttcgggcactgcccaggtccaaaatggcaagtgaaatagtcctaatgggataggctcttaataacgggagagaaacaccatgcacaacaagcccctcaccgctgctatcttcgccgctgccgcactgttcaccgtggccggctgttcatctaatcagtcgctaaaaacgaccgacggaaaaaccattgtcaccgatggcaaaccgcaggtggatgacgacaccggcctggtgtcctacaaaaacgcggaaaccggccgcaccgagcagatcaatcgcgatcaggttaagtccatggacgaactggataactaagcgttatccacggccccgtaccgcggggtcacgcctgcctgaccgatcctcgccctgaacgagagataaatcacacttatcactgtaagcggttcgattaactgtctacactcttgctgattacaacaagagctaacgcaggctaatcaatgatcctcataatttatgcgcacccttatccgcagcactcgcatgcgaataagcggatgcttgagcaggcagggacgcttgacggcgtcgagatacgctctctctatcaactttaccccgatttcaatatcgatatcgctgccgagcaggcggcgctggcccgtgccgatctggtcatctggcagcatccgatgcagtggtacagcgtgccgccgctgctcaagctgtggatggacaaagtgctggcgcacggctgggcatacgggcacaacggtatcgcgctgcgcggtaaatcgctgatgtgggcggtgaccaccggcggcggcgaaagccactttgatattggttcctttcccggtttcgacgtcctggcgcagccgctgcaggcgaccgcgctgtattgcggcatgaaatggctgccgccgttcgcgatgcattgcacttttatctgcgatgacgaaacccttcaggcgcaggcgcgccactaccgtcaacgtttaatcgaatggcaggaggcgcacaataatggatagccatacgctgatacaggcgctgatctatttaggatccgccgcgctgatcgtgccgattgccgtacgccttgggctggggtcggtgctcggctacctaattgccggctgtattattggcccgtgggggctgcggctggtcaccgacgccgagtcgattttgcacttcgcggaaatcggcgtggtgctgatgcttttcgttatcggtcttgagctcgatccccagcggctgtggaaactgcgcgcctcggtgttcggcggcggggcgctgcagatggtcgtctgtggcgtgctgattggcctgttctgcatgtcgctgggtctgcgctggcaggttgccgagctgattggcatgaccctggcgctctcctcaacggcgatcgctatgcaggcgatgaacgaacgtaacctgacggttacccagctgggccgcagcgcctttgcggtgctgctgttccaggatatcgcggccattcctctggtggcgatgatcccgctgctggcggcgagcggcggctcgacgacgctgggcgcgtttgcgctctcggccctgaaagtagcgggcgcgctggcgctggtggtggcgctcggacgctatctgacccggccgatgctgcgttttgtcgcgcgctccggcctgcgtgaagtcttcagcgccgtggcgctgttcctggtgtttggcttcgggctgctgctggaagaggtcgggctgtcgatggcgatgggggccttcctcgccggcgtgctgctggcgagctcggagtaccgccacgccctggagagcgacattgaaccgtttaagggcctgctgctggggctgttttttatcggcgtcgggatgtctatcgacttcggtaccctggtgacgcatccgctgcggatcctgattctgctggtgggattcctggtgattaaatccctgatgctgtggctgatcgcccggccgttaggcgttccgcgcgcccagcgccgctggtttgcggtgctgctggggcaggggagcgaattcgcctttgtggtcttcggcgcggcgcagatggccgatgtcctggacggcgaatgggcgaaggcgctgaccctcgcggtggcgctatcaatggcggccacgccaatcctgctggtgctgctgacccgcctggagaaatccgccagcggccaggagcgcgaagccgatgaaattgacgaagagcagccgcgggtgattatcgccggctttggtcgttacgggcagatcgccggccgcgtactgctctccagcggggtgaagatggtgattctcgatcacgatcctgaccacgtcgacaccctgcgtaaatttgatatgaaggtgttctacggcgatgcgacgcgggtggacctgctggagtcggcgggggcggaaaaggcggaagtgctgattaacgccatcgacgatccgcagacgaacctgcagctggcggagctggcaaaagagcatttcccgcatctgcagatcatctcccgcgcccgcgatgtcgatcattacatcaagctgcgccaggccggggtcgaagcgccggagcgtgaaaccttcgaagcggcgctgaagtccggacgcatgacgctggaggcgctgggcctgggcgcctacgaggcccgcgaacgggccgatctgttccgccgtttcaatctgcaaatggtggaagagatggtggcgatggcggaaaacgacgcggcttcccgggtggcggtattcaagcgcaccagcgatatgctgaccggcattatcaacgaagaccgcaatcatttatcgctggttcagcgtcacggctggcaaggaacggaagagggacggcataccggtgacatcgccgatgagccgcaaaataagccctcggcataagggagaattcagggtgttacgttagctttacaagtaacattttgttttcaatttaaatcctgcctggcggctcacggggcttacgtgggctcgccagcaaatcttaaaattttctgattctttactcttcgcccagtcgacgaagtattacgctttccgtatagtggcgacaattttttgcattcgggaattattcaatgatcagtctgattgcggcgttagcggtagatcgcgtcattggtatggaaaacgccatgccatggaatctgcctgccgatctcgcctggtttaagcgcaataccttaaacaaaccggtagtgatgggacgtcttacctgggaatccatcggtcgtccgttaccggggcgtaaaaatatcgtgattagcagccagcccggcaccgacgatcgcgtgcagtgggtcaaatcggtagatgaagccattgccgcctgcggcgacgtggaagagatgatggtgatcggcggcggacgcgtgtacgagcagttcctgccgaaagcgcacaagctctatctgacccatattgatgcggaagtggaaggggatacccacttcccggattacgatccggatgagtgggagtcggtattcagcgagttccacgatgccgatgcgcagaattcccatagctactgcttcgagattctggagcgccgctaaggttttccccggtgacgttcgctcaccggggtgactctcttcaggaggcgatcgcctcgccttcatcaagattgctctgccggttcgatcgctgcgtgaagtacgttttatcttcccagcgcaggcaggtcagatcgccgccccagcagcagccggtatccagcgcgtaaatcccttccggcgtgcctttcccttccagcgaagcccaatgaccgaaggcaatgctgtactcgctggccaccggcccgggaatagcaaaccacggcttgagcggcgcgggcgcgttttccggcgcctccttggcgtacatatccagctgcccgttcgggaagcagtagcgcatgcgggtaaaggcgttggagataaagcgcaggcgcgccaggccgctgagttcgttgctccagttgttcggcatatcgccgtacatcgcatcaaggaagaacggataggagtcgctggcaagtacggcttccacatcgcgggcgcactgtttggcggtttccagatcccactgcggggtgatcccggcatgggccatgaccagctttttctcttcatcgatttgcatcatcggctgacgacgcagccagttgagcagatcgtcggcgtccggcgcctcaagcagcgatttcagccgatccttgggtttattgcggctaatgcccgcaaagaccgccagcaggtgcaggtcatgattgcccagaacgaggcgtacgctatcgccaagctgtttcacgaaacgcagtacttcgagcgaaccggggccgcgcgcgaccaggtcgcccgtgagccacagcgtatcagtctcagggttaaactccacctgctctaataatgcgatcagttcatcgtagcaaccgtgaacgtcgccaataaggtatgtagacatgttttaatggatgagagtgggtactgcgagacggaaaacagggatttcgatggtgaacggcgcgccgttcacatcgatcatcgcataatgtccctgcatggtgcccagcggcgtttcaatgaccgcgccgctggtatattgatattcgccgccggccggaatatgcggctgctcgccgaccacgccttcaccctggacttcggtctcacgaccgtggccgttggtgataagccagtagcggccaagaagctgaacctgcgtccgccccagattgcgaatggtcacggtataagcgaagacgtagcgctcttcttgcggagaagattgcgattcgatgtagacgctttgcacctgtacacaaactcggggcgaattaatcatggttagctctccttggtgggcgcgttctcagataaccagttagctagctgacagtactgcgctacggaaatattctctgcgcgcttcgccggatcgatgcccagttcggtcagaacctcaacgctgaacaggttgccgagactgttgcggatcgttttccgacgctggttaaaggcttccgtcgtgatacggctcagtacgcgcacttctttcaccggatgcggcagcgtgcggtaaggcaccagacgcaccacggcggaatcgactttaggcggcggcgtaaaggcgctcggcggaacttcaagcaccggaatgatctggcagtagtactgcgccattacgcttaaccgaccatacgccttactgttcggcccggcaaccaggcgattgacgacctctttttgcagcataaagtgcatatcggcaatggcatcagtatagctgaacagatggaacatcagcggggtcgagatgttgtacggcaggttgccgaatacgcgcagcggctggcccatgttctgcgacagctcgccgaagttcatggtcatcgcgtcctgctgataaatcgtcagcttaggtccgaggaacggatgcgtctgcagacgagcggccaggtcgcggtccagctcgataacggtgagctggtcgaggcgttcaccgaccggttcggtcagcgcggcgaggccggggccgatttcaacaatcgcctggcctttttgtggattgatggccgagacaatgctgtcgatcacaaactgatcgttgagaaagttttgcccgaagcgtttacgggctaagtggccctgatggactcgattattcattgagtattaacaatcattttaatggcgagattaagcgccgtgataaaactgccgacttccgctttcccctggcccgcaagttcaagcgcggtgccgtggtcaacggaagtgcgaataaatggtaaaccgagcgtaatgttcacgccgcggccaaagccctggtattttagcacgggcaggccctgatcgtgatacatcgcgagtaccgcatcggcttggtcgaggtatttcggctgaaacagggtatccgccggcagcgggccgctgagattcatccccttcgcgcgcatctcttcgagcaccggaatgatggtatcgatctcttccatccccatatggccgccttcgcccgcgtgcgggttcaggccgcaaaccagcacgtgcgggttgctgataccaaatttggtgcgcagatcgtgatccaggatagtgatgatttcccgcagcagctcaggggtaatcgcatcgcttatcgcttttagcggcaggtgagtggtcaccagcgccacgcgcagcgcttcggtcgccagcatcatcaccactttactggcctgcgagcgctcttcaaagaactcggtatgaccggtaaaggcgatccccgcatcgttaataatgcccttgtgcaccggcccggtaatcagcgcggcgaattcgccgttcaggcagccatcgcaggcgcgggccagcgtttccaccacgtagctgccgttgctgacgttgagcacgcccggttcaaccggcgcgttgagcgcgacggggagaagggtcagggtacctgcacgctgcggcgtagcgggagcggtggggttgtaaggcagaagcgataaaggaagaccgagcaggttcgcccggtcagacagcagagcgccatcggcgcagatcaccagctctaccggccagtcgcgctgcgcaagctgcacaacgaggtcggggccaatcccggcgggttcaccgggagtgataacaactcgattcatacacgtcatccttcaggcggtctcttactggctgcgcttcgtcgcccccgtcagagaccggggcgatttgctcagccgcctcgatacaccctgagcgatgttgtgtatgaggctaatgcaattagttgctcagaaccttcacgtaggcgctggcgcgctgttcctgcatccaggtcgccgcttcttcagagaacttacggttcatcagcatgcggtaagcacgatctttttgcgcggcgtcggttctgtcgacgttgcgggtatccagcagctcaatcaggtgccagccgaaggaggagtgaaccggagcgctggtctggcctttattgaggcgcagaatggcgtcgcggaaggccggatcgaagatatccggcgtcgcccagcctaaatcaccgccctggttggcagagcccggatcttcagagaactcttttgccgctttggcaaaggtggtttttccactcttaatatccgccgcgatctgctccagcttcgcccgagcctgatcgtcgttcatgatcggcgacggtttcagcaggatatggcgagcgtgaacttcggtcacggagatgttctggctgccgccgcgcatatcgttaattttcaggatatggaagcccacgccggaacgtatcgggccgacgatatcgccttttttcgcggtgctcagcgcctgggcgaagatgcccggcagttcctgaatccggccccagcccatctggccgcctttcagcgcctgctggtcggcagagtaggtgatagccagtttgccaaagtccgcgccgctgcgcgcctgctgaaccactgaattggcctgatcctgagcctctgccacctgctcggacgttgggttttccggcagcgggatcagtatgtggctgagattcagctcggtgctggcgtcgttctgatcgccaatctgtttggccagggtttcaacttcctgcggcagaacggtgatacgacgacggacttcgttgttacgtacttccgaaatcagcatctctttacgaatctgattacggtaggtgctgtagttgataccgtcataggccagacggctgcgcatctgatccatggtcatgttgttttgtttggcgatgttggcgatggcctggtcgagctgatcgtcagagatcttcacgcccattttctggcccatctgcaggacaatctggtccatgatcagacgctcaaggatctgatgacgcagggtggcgtcatccggcagctgctgcccggcctggccggcgttcagttttaccgattgcatcaagccatcgacgtcgctttcaagaacaacgccattattgacgacagccgctactttatcgacaacctgtggggcagcgaaactggtattcgcgatcatggcgataccgagaagcagcgttttccagttcttcatactttttccatttcaattaaccgcaattgcggattacgtgtaaaccagccacatcacagggagctctggtacggtaaaatgttcgaacgcagcatctgctgggtgccgagaccgtagttggagctcaggccgcgcagctcaatgttaaagccgaaggtgttgtcgtatttgctttcgctgctgctgttatcccagccgttgatcttacgttcatagccgacgcggatagcgtagcagcaggagctatactgaacccctaacatctggttcgctgactttctggtattcgtgtcgtagtaatacgcgccgacgactgcccaacgatcgacgattggccagctggcggtcatccccacctgcgagataccatctttgtactgcttagcggtggaataagacggcagggtcgcctgaatgtattccgggctcgcataacgatagttaagttgtactaaacggttttcgtcgcgacggtattccacggttccgctgccggttgcgacgttatccagacgcgtatcgtactgaattcccccgcgtaaaccccagtcatcggcgatgcgccagtaggtatcgccagcccataccagtgaacctcgcgtgtcgttgttctcccagttgatgttgtcgtcaccggtacgtgcctcggtgaaatagtagatttgaccaacggaaatattaaaacgttcaacggcggcggcatcataaacgcgagatgtgacgccggtggagacctggttggcggaagcgatacggtcgaggccgctataggtacggtcgcggaacaggccgctgtagtccgactgcagcagggttgagtcgtagctgccgatcttgctctggtcacgataggggatatacagatactgcatccgcggctcaagcgtctgggtatagttctcctgcatatcgcgctcgaaaaccattttaccatcgactttaaactgcggcatgacgcggttaacggagtctttgtaatcggtaccgttggccgcattgtagtcatcaaggttgctttgctggtaatgggttgccagcagttttgcctcagtattgatgcttccccagccgttagacagcggcagattgatggttggctcgaagtgaacgcgcgttgcttccggcattctgctgttcgagttaacaaaatgcaccgcctggccataaagatgggtatcaaacgggccgacatcgttctggtagtagttcacgtccagctgcggctcggctgaataggcgttgcttgagtcgcggttaaagacctggaactgcttggtcgatacggtggcgtcaaagttctgattcgcgtagccggcgctgagcttctgcgtcgcgtagccatcggtactggaaccgtatttagagctgaagtcgttaaagtagtccgggtcgctgactttggtgtagtcggcgttgaagcgccacacctggtctacgacgccagaatggttccagtagaacagccagcggcggctattgctgtcgccagagtgatcgtcctggtaaattttatccgaaggcaggtagtcgaactcgattaggccggttcctgctttggtcagatagcggaattcgttctcccacatgacgccgccgcgcttgctcatatagtgcggcgtcagcgtggcgtcgaagttcggggcgatgttccagtagtaaggaagatagaactcgacgccgtttttggtgctgtatttggcgttggggatcaggaagcccgaacgacgcttgtcgcccaccggcagctgcaggtagggactataaaaaatcggtacggaaccgagcttgaagcgggcgttccagatctcagcgacctgttcttcgcggtcgtggatgacttcactgccgaccacgctccaggtgtcagagcccggcagacaggaggtgaagctgccgttttctaagatggtatagcggttttcaccgcgctgtttcatcaggtcagcggtaccgcgcccctgacggccaaccatttggtaatcgccctgccagacgttggtatctttggtgttcagattcgaccaggctttcggccctttgaggatcacctgattgtcatcatagtgaacgttgccgagggcgtcgaccgtgcgcaccggctgcggctggcccgcggcctgctgctggtgaagctgcacttcatcggcctgcagtcggctgttcccctgattgatatcaacgttgccggtaaatacggcgttatcaggatagttgcctttcgcatgatcggcatcgatcgtcaccggcaggtcgttgggtttcccttcaaccaaaggacgattgtagcttggtacgccaagcatacactgcgtggcgagatcggcagcgaggccctgttggctatacaaggcgctggcaatcatggtggccaggaggctgggaatacgttttttcatacgttgtatttgttgttccgtcatcgtgtggcagcggcttgcaaacggtcagagcctaacgtactcgtctaaatcgcgctagtgttaatcctgcccgtttcgagcccgagcgttaggcaccgtgtagaatgacgagtatgataaagcaaattataggctatgtcccacaattgaccgaggcgtaaacgctttgtaacgtgcggtcagatatagcttaactggcggcagagagattggggagtctatgcagtatttgggtaaaataattggcgttgcggttgcgttgatgatgggcggcggcttttggggcgtggtgctgggcttcttaatcgggcatatgtttgaccgcgcgcgcagccgccggctgaacgtctttgctaatcagcaggagcgccagtcgctgttcttctcgacgacgtttgaagtgatggggcatctgaccaaatcgaaagggcgggtcaccgaagccgatattcaggtcgccaatttgctgatggatcgcatgaacctgcacggcgaagcgcgtaccgcggcccagcacgcgtttcgcgtagggaaatcagatgattacccgctgcgggagaaaatgcgccagctgcgcagcgtctgctttgggcgttttgatttaattcggatgtttctggaaattcagctgcaggcggctttcgccgacggcgaactgcatcccaacgaacgtgacgtgctgtttgtgattgccgacgagctgggcatctcccgcgctcagttcgaacagttcctgcgcatgatgcagggcggggcgcagtttggcggcggttcgcagcagcaatcttacggccagcgcggcggcaacgccggctggcagcaggcgcagcgcgggccaacccttgaagatgcctgcaatgtgctgggcgtcaaaccgaccgacgatgccgccaccgtcaagcgcgcctatcgtaagctgatgagcgagcaccatccggataagctggtggcgaaagggctaccgccggaaatgatggagatggctaagcagaaagcgcaggagatccagaaagcctgggaactgattaaagagcagcgcggcttctaaacgaccggcctctcccgggtgggagaggcgtcacgatacgctggcggcgcggcggtacatacgccgcggatggccaatcttgccgtacagcatttccacctccagaaagccgatttccacgcagtgctccagatagcgacgggccgtggttttgctcaagccagcctcgctcaccacgtcatcaaccgaaaagcagcgctcttcttcgccgataaacaggctctgcaccagcgccagcgttttttcttcaatgcctttactgccgctatcggctcggtagtttttagcctgcagctgatacagcgaatccacgttctgctggtcgacgattttccattcgcgctgctgatcgtagaactgcacgaaccgttcaagggactggctcaggcgcttccatgataccggcttaagaatgtagtcgaaggcgccgttgcggattgcctggctacaggtttccatgtcgctggcggcggtgataaagatcaccgagcagttagcatgggccataatagggtcgttcatcagggtgacccctttgccgtccggcaggtagttatccagcagcaccagctgcggcggtctggcgttgagtatctgccgcgcctgggcgagagaggccgccgtgccggtcagccgcatgcgcgggtgtttctggataagctcggcgtgcagccgcgccagttcgctttcatcttcaacgatcaggacatcgaccaggtcatgatgcatagtgcgtctcttcttgcggatgggctggcccgctggcgggaataaacagcgtgaaaatcgccccgcgcggcgcgttgtcggccacttcaatcgtgccgccagcctgggtgacatagcgctcaataagatacagtccaataccgtgatcgccgcgggttttggtggtgacgccgcgctcaaatatatgctcgcggatctccggacgaataccgacgccgcgatcggcgacttcaatcattaattcccgggcgttgagctgaatcaggatctcgaccggttcgtgcggcagttcggcgcgctgggtggcttcaatggcgttatccagcagattaccgatgatagagataagctcggactccatcaacgacggcagcgggcggtcgatgcggcaggccgggtcaaagctcagctcaacccctttttcccgcgcgcgggcggctttacccagcagcaggccgcacagcgtcggcgaattaaagtgcgatgaaataaagtccagcagctcctgggcatgctccgactgcgcctgaatatagcgaatcgcctcatcatagtggcccatatgcagcaggccggagagggtcgtcatccggttgagctgttcatggcgcatgatgcgcagattatcaacgtagcgttttacctggctgagctgggcgctcagggagttgatttcatcgcggtcgcggaaggtgatcacccagccctggagcgcattctccagcatgattcgcacccggctggcgagtaccgtcagctgattaaaacggcacagctcgtcgtgggtatcgctttcgaacatctctccgccggcgaaaaacggctgcggcgtaatgacgctatcgatagacttaccgcgcagctggtgcgcgggctggctcagtccgagcaggctgcgggcggcgtggtttatcacttcaatacgccggtgatggtcaatcacaatcaccccttcgtatatcgactccatcatcgctttttgctgacgtaccagcaggccgatttcgcgcggctccagcgagaaaatttgtttcttaatgctgcgggtgaagtaccaggagaagataaacagcgcgataagcagcagcaccgcggcgatgaaaatattgatgacttttgccagcgtgatgctgtcgagatagctggtgaggtagccgacggagacaatgccaacgacccgacccgcgtcatcgaaaatgggcgctttgctgcgcagggaaataccgagtccccctttgcggatggtggtcgtgcttttcccctcaagtaccggctggttatcgccgccaaccagccgcgtgccgacccactccggatggacagagtgaaacagatgcacgccccgcttatcgccaatgacgataaaactggcgtcgctgtgggcggcgatattttgcataaaaggctttgtcgccagcgcgtcttcacgcgccacctgctgacgtaaatccggcatcagcgcgatttcttctgcctgtattttcgcgcgggcgctcatttcctgataaagctgatggctggcgtcgaaatagtaatacacgcccagcagcgcaaacagcactgagaaaaaagcgaccagcgaaatgaacagcttaaactgaaatgaaaccttcataagtataatgcacagtatcagggatacggcagcgtatcattttttcgctgccggcatcgtggctgagggaaaccggtgaacgtcacaagagcgtccgggaaccacaattatccgctggcggggaatttatcaaggttaatcaggcgctggatttaaaaaccttaaaaaccacggcaataaatcagagcggtttcacaataataatagaaaccataaaaaccatagtgaccattaaaacttcttttttaatctgccgatcctcacattaactccgcacgtggccctctaacctgaaaagtaataataaccagagggcttaattatgagcaccacagacaatgcattctctgcaaccatcgaccctattaatacgccgaaacccgcgcttaagcagcgctggtggcatatcctcgataactggaaagtcggtattatcccgctgccgctctttttgctggccggcggcctgatcgcgctggactgcctgggcggcaagctgccgagcgatatcgtcgtgatggtagcgacgctggcctttttcggttttgcctgcggcgaattcggtaaacggctgccggtactcggcaagctcggcgcggcggccatctgcgcgaccttcatcccttctgcgctggtgcattacggcctgctgccggaggtggtggtggagtcgaccaccaaattctataagtcgaccaacattctttatctttatatctgctgcattatcgtcggcagcattatgagcatgaaccgcaccacgctgattcagggttttctgcggattttcttcccgatgctgtgcggcgaaatcgtcggcatggtggtcggcgtcggcgtcggtaccgcgctggggctggagccgtttcaggtgttcttctttatcgtcctgccgatcatggccggtggcgttggcgagggggcgatcccgctgtcgattggctacgccgcgctgatgcatatggatcagggcgtggcgcttgggcgcgtgctgccaatggtaatgctgggcagcctgacggcgatcgttatctccggctgtttgaaccaactgggcaagcgtttcccgcatttgaccggggaggggcagctgatgccgaaccgccgcaacgagacgcatcgcgaaacgcccgccgagggcaaaatggacgtgacaacgctggcctccggcgcgctgctggcggtgctgctttatatgctgggtatgctggggcagaagaccatcggcctgcccgcgccggtgggcatgctgttcctcgcggtgctgctgaagctggtgaacggcgtctctccgcgcctgcaggaaggttcgcagatggtgtataagttcttccgcacggcggtcacctatccgattctgtttgccgtcggcgtggcgatcaccccatggcaggagctggtcaacgcctttaccgtgaccaatttgctggtgattatcagcaccgtaacggcgctggtggcgaccggtttcctggtcggcaaaaagattggcatgtacccgattgacgtggcgattgtctcctgctgccagagcggtcagggcggtaccggcgacgtggcgattctgacctccggcaaccgcatgaacctgatgccgttcgcgcagatcgcaacccggatcggcggcgcgattaatgtttcgctgggtctgctgttcctcagtcactttctggcctgatttaacttttttataaccgctaagtctgctttttcgtgctaaatggcgcagaaaatatctgcgccccgtctccaaaacagggatcgtttagcgatacaatcagcgccattattcgcgactgcgacggcagcctgtccgctgccttttattaagtgaggagagaaacaaatgtcagtggatactctcgcccgtgagggcgtaagcatggaagcgctgctggcggcgaaagagcagcgcgccgcgcgccaggccgactggttagcccattatcagcggccggtgatttcgctgaccctggtgacgccgggcgcggtgaaagacagcattcgctaccgtaatatgatgggggtggcgctgcaggcctgcgatcagatgctgtggaaacaccgctggcagacgctggatcgccaggtgctgtggctgccgaccgggccggaagcgctgtggtgcgtcgatcacgccgccagtgaaatcaaagccttctgtaccgatcttgagcatacccatccgctgggccgcctgtgggatattgacgtcatttgcccgaaaaatggcctggttggccgtcagtcaatgggggagaaccagcgccgctgcctgctgtgcgacgagcccgcgcacgcctgcgcgcgcagccgccgtcatgacaccgggcaggttgtggcccgcgttgagcagatgattgatgcgtggtttgcccgcgactgacgcccgttttccgcggcattgatgagcgaggagttgcccgggtgagccgctggcggcacgacccgggacagagaggtacggtcagaagtcgatcggcgcgcgaaacgtcatcgtattaccgaaagcggggtgggtgatggtcagcgtttcggcgtgcagcagcagacgcggcgccaaggccagcgcttccggcgacgcataaaagcggtcgccaagaatcggatggcccagcgccagcatatgcacgcgcagctgatgcgaacgcccggtaatcggcttcaggcgcacgcgggcggtgttgtccgccgccaactccagcacttcatactcggtttgcgccgctttgccggtttcgtaacacaccttctgctttggccggttcggccagtcgcaaatcagcggtaaatccaccagaccctcggttttctccggatgcccccagacgcgggcgacgtactgctttttcggctcccgttcgcggaactgccgcttcagctcgcgctctgccgctttggtcagggccaccacaatcacgccgctggtcgccatatccagccggtgcaccgactcggcctgcgggaagtcgcgctgaacgcgcgccatcacgctgtctttgtgctcggcaagccggcccggcacggacaacaggccgcttggcttgttgaccaccataatgtgctcatcctggtagaggataaccagccagggatcctgcggcggattgtagttttccatcgccatattcgcgttccgttactggtgggtgaccacgattaagcgcagcgcatccaggcgccagcccgcctgcgccagcgcgtccataacctgctgacggttgctctcgatagccgtcagttcatcatcgcggatgttcgggttcacggcgcgcagcgcttcaaggcgcgacagctcggccgtcagcttatcgtcggcttctttacgcgcggcgtcgatcagcgcctgggccgctttggctacctgcccttcgccctgctgtaaaatcgcgtggacgtcctgctggacggcgttgaccagcttgctgccggtgtggcggttaaccgcgctcagctgacggttgaagctttcgaactccacctgaccggcgaggttgttgccgtttttgtcgagcagcatgcgcaccggcgtcggcggcaggaagcggttgagctgcagatgcttcggcgcctgcgcttcaacgacgtaaatcagctccagcagcagagtacctaccggcagcgctttattcttcagcagcgaaatggtgctgctgccggtatcgccggagaggatcagatccagaccgttgataatcagcggatgctcccaggtgatgaactgcgcgtcttcgcgggacagggcgacgtcacgctcaaaggtaatggtgcagccatcttccggcaggcccgggaaatccgggaccagcatatggtcggagggggtcaggacaatcagattctcaccgcgatcgtcctggttgatgccgacgatatcaaacaggttcatggagaaggcgatcaggctggtgtcgtcatcctgttcttcaatgctttccgcaagctgctgggctttttctccgccgttggagtggatctccagcagacggtcgcggccctgttccagctgcgctttcagcgcttcatgctgctggcggcaggctttgatcaggtcgtcgaagccgtcggtattttccggcgtggcaagatagttgatcagttcgttatgcacgctgtcgtagacggtacggccggtcgggcaggtgtgctcgaacgcgtccaggccttcgtgataccagcgcaccagcaccgactgggcggttctttccagatagggaacgtggatctgaatatcgtgagcctggccgatacggtcaagacggccgatacgctgctccagcagatccgggttgaacggcaggtcgaacatcaccagattgctggcgaactggaagttgcggccttcggagccgatctcagaacacagcagcacctgagcgccggtatcttcctcggcgaaccaggcggcggcgcggtcgcgttcgataatcgacatcccttcgtggaacaccgcggcgcgaatgccttcgcgctcgcgcaggacctgctccagctgcagcgcggtggccgctttggcgcagatgaccagcactttctgcgagcggtggctggtgagatggcccatcagccattcaacgcgcggatcgaagttccaccaggtgccggtatcgccttcaaattcctgataaatttgctccggatagagcatgtcgcgggcgcgctcttcggcggttttgcgggcgcccataatgccggaaaccttaatggccgtctggtactgggtcggcagcggcagacgaatcgtatgcagctcgcgtttcgggaaacctttgacgccgttacgggtgttgcggaacagcacgcggctggtgccgtggcggtccatcagcatcgacaccagctcctgacgagcggcctgggcatcatcgcgatcgctgttggcggcctgcaataatggttcaatatcctgttcgccgatcagatcgctcagcgcgttcagatcggcgtcgctcagcttattaccggccagcagcagggcgaccgcgtcggcaaccggacggtagttctgctgctcttcaacaaactgggcgaagtcgtggaaacggttggggtcgagcaggcgcaggcgggcgaagtggctctccattcccagctgctccggcgtcgcggtgagcagcagaatgcccggcacgcattcggccagctgttcaatcgcctgatattcccggctcggggcgtcttcgctccagaccaggtggtgcgcttcatcaacgaccatcagatcccattcggcttcgcacaggtgttccaggcgctgcttgctgcggcgcacgaaatccagcgaacagatcaccagctgttcggtttcgaacgggttaatcgcgtcgtgctgcgcttcggcatagcgctcatcgtcaaacagcgagaagcgcaggttaaagcggcgcagcatttccaccagccactggtgctgcagggtttccgggacgacgatcaggacgcgttccgcggcgccggagagcaactgctgatgcaggatcatcccggcttcaatggttttacctaaacctacttcatccgccagcaggacgcgcggcgcgtggcggcggccaacgtcgtgggcgatattcagctgatgcgggatcaggctggtgcgctggccgcgcaggccgctccacggcatgcggtactgttcgctctggaatttacgcgctcgatagcgcagggcgaaacgatccatacggtcgatctgtccggcgaacagacggtcctgcggtttgctgaagaccagcttgctgtcgaggagcacttcacgcagggtaacgttggcttcctgggtatcgaggcgggtgccggtgtaggccagcagaccgttctcttcattaacttcgtcaacctggagttgccagccttcgtggctggtgatggtatcgcccgggttaaacatcacgcgggtgattggggagtcgttgcgtgcgtacagacggttttcgccgatggcggggaaaagcagggtcaccatgcgcgcgtccagcgcaacgaccgtccctaatcccagttcgctctctgtgtcgctaatccagcgttgaccaagtgtaaaaggcatatatgttcggctctttagttctttgattgcaggcaatagttgagcatctccatggagaatcggagatacgtcaaaattgggtccaggaatggaaagggcgctatattactggatggcggaacgttcgtcacgtcctcctcacccttcattttgcggcttttgcgccagcggaatgagtgagaaaaaatcaaaatagccccagctgccccgtcactattgtagcaaaatcgtcgtcgacaaagggaagtattccttcggcgacaggctctaattgcttagaaagatagtgttcataatccagcggtgactgctgataatccaccggctccggcccgccggtagtccagacgtatttaatgctgccgcgctgctgatactgctgcggcctgcccagcctgacgttttgctcatcagcgagcctggccgcgcgcacgtgcggcggcacgttgcgctgatactccgccagcggacggcgcaggcgcttgcggtagaccagccgatcgtcaagctcgccgttcatcagcttatcaatggtttcgcgcacgtaatcgcgatagggctgatggcggaaaatgcgcagataaagctcctgctgaaactgctgggccagcggcgtccagtcggtgcgtaccgtctccagccctttaaacaccatgcgctgctcgctgccttcctgaatcatcccggcgtagcgctttttactgccggtatccgcgccgcgaatggtgggcatgagaaagcggcagaagtgggtttcgaactccagctcgagggtgctgacaagcccctctttgctcagctccgccgcccaccattcgttgacgaaggccaccagcgagcggccgatgctgctggcttcctcttcgctgtgggatcgcttgagccacacgaaggtggagtcggtatcgccgtagataacgtcatagccctgggattcaatcagcgctttggtctggcgcataatcgcgtggccgcgcatggtgatggatgaggccagacgcggatcgaaaaagcggcaggcgctggtaccgagcacgccgtagaaggcgttcataatgattttcagcgcctgcgacagcggtttgtttttatgctgcttggcctcgtcgcgcccgtgccagatttgcccgacgatccccggcaggcagtgtctttctcgcgagaagcgcgcgccgagaaagccttcggtgctgtgggcgtcatcgggctgcgccagaccttccaccagccctaccgggtcgatcagaaaggtgcggataatcgacgggtacaggcttttgtagtccagcaccagcaccgagtcgtagaggccggggcgggagtccatcacgtagccgccggggctggcctgcggcggcacttcaccgaggttcggcgcgacgtagccgagccggtgcatgcgcgggaaatagagatggctgaaggcggcgaccgaaccgccgtggcgatccgcgggcaggccgttgaccgtcgcgcgctccagcaaaaacggcatgatctcggttttatggaagatgcgcgtgaccagctcgcagtcctgcaggttataggtggccagcgccggtttatcctggtgaaagcggcgatcgatttcatccatccgatcccaaggattatcaatggccttgccctcgccgagcagctcgcgggcgaccgactccagcgcaaaagaggagaagttccagaacgcggatttcagcgcctcgatgccatcgataatcaggcggccgttggcctgagcaaagaagacgccattcttaaaaccgtgttcgcgccactccagttcgctgttgccgcggccgagcagcagcgggatgcgatagcgctcggcgtgcttttgcaggacgcgtaaatcaaactgcaccacgttccagccgatcagcacgtccgggtcgtgggcggcaaaccaggcgttaagcttttccagcagcagcgggcggctggcgacgtactccagttcgaaatcgacggcaggcggggtggccggttccggccctaacatatagacgacccgctggccgcagccttcaaggccgatgcagtagagctcgccgtggcggctggtttcgatgtccagcgacacccactttaggggcggccggtagtggggattgggcttcatccgcgcgttgaccagccgctgaccgcgcgactcgccttcaacccacaccggggcggtgataaagcgctccatcagatagcgctccggcgggcgaacgtcgccttcatataccgtgacgccgttttcgcgcagctttttttccagccgcatcagctggcggtgagcgcggcagtagagaccaaacacccgctggcgatgaaaatcttgcagagtgagcgcagcaaggcgatggccgttttcgccctgcagcaggcgttcagcctgcgggcgctgcgattcgggaatgaacgcgacggattcctgcggcggcagggtgacctcaagcgggccgtcatcggtcgccagccagaatgtcagttcggtgccctgcggggtatcccgccagtgacgggtgagtaaaaaacctgctcgtggctgcgtcacgccgtgctctcatcagtaaaaaccaggcctgattatagcctggttcaccaaatgatgctggggttttatacaggtgtggcgcgctgtttcccggacttagccgggctaccagcctgtagccccgctaagcgcagcgcgagccgggaatgctgcggccttactgcccgtaataggctttcgcgccgtgcttgcgcagatagtgtttatccagcagcgtttgctgcatctccggcagctgcggcgccagctggcggcagaagatgcccatataggcgatctcttccagcacgatagcgttatgcaccgcgtcttcggcgtttttcccccaggcaaacgggccgtgcgagtgcaccagcacgccgggcatttgcgccggatcgatacctttttcacggaaggtttcaacgatcacttcgccggtttgccactcgtactcgccgttgatctcatcgtcggtcatcaaacgggtacaggggaccgcgccgtagaaatagtcggcgtgggtggtgccggtagcgggaatcgactgtccggcctgcgcccagatggtggcgtgacgcgaatgggtatgaacaatgccgcccagcgtcgggaatgcctgatacagcagacggtgggttggcgtatccgaagagggctttttcttgccttccaccacgtcgccggtctccaggctgaccaccaccatatcctcggcggtcatgacgctgtagtcgacgccggagggtttaatcaccagcacgccccgttcacggtcgacggcgctgacgttgccccaggtgagggtaaccagattgtgctttggcagggccaggttggcttcgagaacctggcgtttaagatcttctaacatactgtgctccgaattgctggcgagtcagttcccctcacccgcaccctcagggagagggtgaggggacggcccttagcgttttgaaccgtaatacacttcgttccagcgcagcgcgtccttgaaggagggcagacgggtttcgttatcaatcacggtcagctcgatatcctgcagctcggcaaactggcgcatatcgtcgagggtgagcgcatggctgaagacggtgtggtgcgcgccgccggcgatgatccaggcttcggacgcggtgcgcagatccggatgcgctttccacaaggcgttggccaccggcagcttcggcagttcgtgcggcgttttcaccgtttcaatggtgttcaccagcagacgatagcgatcgccgagatcgatcaggctggcgacgatcgccgggccggtctgggtgttaaagatgatgcgcgccggatcggctttcccgccgatgcccagcggctgcacgtcgagaatcggtttttcaggggtggcgatggtcgggcagacttccagcatatgcgagcccaacgccagatcgttgcctttctcgaagtggtaggtgtaatcctccataaaggaggtgccgccctgcagaccggttgccatcaccttcatgatgcgaagcagagcggcggttttccagtcgccctcgcccgcaaagccgtagccctgctgcatcagacgctgcacggcgagacccggaagctgtttcaggccgtgtaaatcttcaaaggtggtggtgaacgcgtggaagccgccctgttccaggaagcgcttcatccccagctcaatgcgcgcggcatcgagaaggttctgccgcttatcgccgtggatttgcaccgcgggggtcaggcgatagctgctttcatactcatccaccagggcgctgatttcaccgtcggtgaccgcattgacgacctgcaccagatcgcccaccgcccaggtgttaaccgagaagccaaacttaatctgcgcggcgactttatccccgtcggtgaccgccacttcgcgcatgttatcgccgaaacggcacactttcaggtggcgggtatcctgtttagagaccgcctggcgcatccacgcgccgatgcgctgatgggcttctttatcctgccagtggccggtcaccacgctgtgctgctgacgcatgcgggcgccgatgaagccaaattcgcggccgccgtgggcggtctggttcaggttcataaagtccatatcgatgctgtcccacggcagggccgcgttgaactgggtatggaactgcatcagcggtttattcaggatcgtgaggccattgatccacattttcgccggcgagaaggtatgcagccacaccaccatcccggcgcacttatcatcgtagtttgcgtcgcggcagatatgggtgatctcatccggcgtggtacccagcggcttaagcaccagtttgcacggcagtttggcttccgcattcaggctgttcaccacatgttctgcgtgctttgtcacctgacgtagcgcttcagggccgtacagatgctggctaccgataacgaaccacacttcatagttattaaaaatcgtcattttcatgtccttaatgggtgagggctgcctgagattgcggcgcggattccgcttttgcagtcgaagggagataacgttgttccgcgctgagcgaccactgctggtagcgctgatagagttgttcgaagcgttgcgcctgcgccggacgaggctgcagggtactttccacctggctggccatgttttcctgcgcggcagggatatcgcggtatacgccggcggcaacggcggcgaagatagccgcgcccagggcgcagcactgatcggacgcgacgatttgcagcgggcgattcagcacatcgcagcaggcctgcatgatcaccgggtttttgcgcgcgatgccgccgagcgccatcacgttattgaccgggatcccctgttcggtgaagcactccataatggcgcgggcgccaaaagcggtggcggcaatcagtccgccgaacagcgccggggcgtcggtggcgaggttcagatcggtaatgacccctttcagacgctggttggcattcggcgtacggcggccgttaaaccagtccagcaccaccggcaggtggtcaagagacggattttttgcccatgcgtcggtcagcgcgggcagcagctgtttctggctggctttgatctgctctttgagttccgggtgggcctgcgccagctgctccagcggccagccgagaatgcggccaaaccaggcgtagatgtcgccaaaagcggattgccccgcttccataccgataaagtcaggcacgacgctgccgtcgacctggccgcaaatcccttgcaccgtgcgctcgccaacgctctgtttatcggcgatcagaatgtcgcaggtggaggtgccgataactttgaccagcgcgtttggctgcgcaccggcgccgacggcgcccatatggcagtcgaatgcgccgccggagatggcgacggtttgcggcaggcccaggcgcgcggcccattcggcggtgagcgtgccgaccgggatatccgcagtccaggtatcgctgaacatcgggtaggccaggctctggttgattatcgggtcgagttcatcgaagaaaccggcaggcggcagtccgccccagctttcatgccaaagggatttgtgcccggcgctgcagcggccgcgacgaatatcctgcgggcgggtggtcccggaaagcagggccggcacccagtcgcacagctcaatccacgacgcggcggcctcggcgacggcgctgtcctggcgggtcacgtggaggatcttggcccagaaccattcgctggagtagataccgccgatatagcgggagtaatcctctttgcccggctggtgacacaggcgggtaatctcctccgcctcctccaccgcggtatggtccttccacagcacgaacatggcgttggggttgctggcgaactcgtcgcgcagcgccagcacgttgccgtcggcgtcgatgggcgcgggggtggagccggtgctgtcaacgccgatacccaccacggcagcgcgctgttcggcgctaagcgcggcgaggacgcttttcagcgcggcttccattgattcgatatagtcgcgtggatgatggcggaactggttgttcggaccatcgcaaaatagcccctcctgccagcgcggataccactcgacgcctgcggcgagctcttcgccggtcgcgcactctaccgccagggcgcgtactgaatcactgccaaaatcgaggccaatcgcaattgccatactgttactccatgctaaaaatcattcatggtgaaacagtagatatctgggctgaaaaccgtcaggccgtattcgctaatcttatggactatattgctgtgacgtcgcaaagtgtgacgccgtgcaaatattcaatgtggactttcctgccgtctttatagacacttcagttatgcgctgaaagcgcctgaactgtgcgccgtgctcagtttttatcgagaagaggcgggttttaattcattttctaacccgcgtcgcagcatgagcgaccagccagaggataaaatacaaggtatggacaattggtgtccttaatgtctcctggagagcagagtttatggccgaaacgcaaaacgatcctttgttgccgggttactcttttaacgcccatctggtgacgggcctgacgccaattgaagccgatggctatcttgatttctttattgaccgtccgctgggcatgaagggctatatccttaatctgacgattcgcggcgaaggtgtgatcaataaccacggggagcagtttatctgccggcctggcgatatgctgctgttcccgccgggagagattcaccattatggccgccatcccgatgcccgcgagtggtatcaccagtgggtctatttccggccgcgcgcctactggcatgaatggcttaactggccaacgatttttgcccagaccggctttttccgcccggatgagcagtggcaggcgcgctttggcgaactgttcgggcagattgtggaggccgggcagggcgccgggcgttactccgagctgctggcgatcaatcttatggagcagctgctgctcaggcgcatggaagctatcaacgaatcgctgcatccgccgctggataaccgggtgcgcgatgcctgccagtacatcagcgatcatctggcggacagccatttcgatattgccagcgtcgcccagcacgtgtgcctgtcgccgtcgcgcctgtcgcatctgttccgccagcagctggggatcagcgtactggggtggcgggaggatcagcgcattagccaggccaagctgctgctgagcacgacgcggatgccgatcgcgaccgttggccgtaacgtcggttttgaggaccagctctacttttcgcgcgtgtttaagaaatgcaccggcgccagcccgagcgagtttcgcgcagggtgtgaataaaaagtaaagaaagtgaaatgatggcccggatttttaacacagccagtaaactatacaaacaaatgatggcttgacgaagtatgaacggctccggagaatccgtgcttcgtttttaaaccgggtacattatgcaagcattgctggaacactttattactcaatccacggtctattctctgatagccgttctgctggtcgccttcctcgagtcgctggcgctggtggggcttatcttaccgggaacggtgatgatggccggattgggggcgctgatcggcagcggcgaggttaacttctggcaggcgtggctggcggggattatcggctgtttgctcggcgactggatttcattctggcttggctggcggtttaaaaagccgctgcatcgctggtcttttttgaagaaaaacaaagcgctgctggataaaaccgaacatgcgctgcatcagcacagcatgtttacgattctgattggccgctttgtcgggcccacgcgtccgctggtgccgatggtcgccggaatgctcgatctgccggtcgcgaagttcatcccgccgaatatcatcggctgcctgctgtggccgccgctctacttcttaccgggaatccttgccggggcggccattgatatcccggccgatgagaatagcgccagctttaagtggctgctgctgggggcggcactgctggcgtggctggcggcgtggctatgctggcggctgtggcgcagcgccaaaagcgctggcgatcgtctcacccggtttctgccgcgttcgcgcctgctgtggctcgctccgctcatggtgtgcgccgccggcgcggcgctggtgtttgccttccgtcatccgctgatgccggtctatctcgacatcctgcataaggttattttgcgctaattcccagcagcgccgaggcgctgctgttgccgctgagcagcgcggcggtcgcgccatcccaggcaatgcgtccctcagccacgaccaccgaccgcggcgcgatgcgcgccgcatcttccacgctgtgcgagaccatcagcagcgtcagctgccgctgctggcagacatcggcaaccagcgtcagcatctccagcctcagcgcgggatcgagcgccgagaagggctcatccagcagcagtaccggctgctggcgcaccagacagcgcgccagcgccgcacgctggcgctggccgccggaaagctcgcccggcagccgctctaacatcgcgtcaatccccatctgtccggcaatcgcctgcagatgggcggattgatccgcgttcagcttgagccccggatgcattcccagcgcaatgttctggcggatggtgagatggttgaacagattattttcctgaaacagcatcgataccggacgacgcgcgggcggcgtgtgggtatggggctggccgtcgagcgcgatactgccgctggcgggcgttaaaaaaccggcaatcaggttcagcagcgtgctttttccggccccgctcgggccaagaaccgcgatgcgctcaccgcgttcgacggaaagcgtaaaacgcatcggcagatgctggtaaagccaggtcacatcattcagttttagcatcgcgtcccggaagtttttcaatcacgctaaagagtaaaaagcacagcagcagaagcagaagggcggtcacggcgccgtcctggctacggtaagaaccaatttgctgatacagataaaagggcagcgtacggaaatcttcgttgccgaacagcgccacgacgccgaaatcgccaatcgatagcacgcaggcgaaggccagcgcctgggccagcggccgctttaaagcgcgaagctcaaccacccgaaggcgggtgaagccgtgcatccccagcgactggcagagggtgccgtagcgggcggcgatatcgcgcatcggattttccagtaccttgagcgcataggggattgccatcagcgcattggtgaaaatcacgataccgtcggcggactcgggcaggcccacgctgttattgagcaacaggaagaaaccggtggccagcacgatgcccggcatggcgaggatcagcatcccgctcagctcaagcgcctgaccggccagagggtgacggcgggcgcgaagctcgcggctgctccagagcagcatcatggtaaggatgacgcttaagagcccggcggcaagcgcgatacgcagcgacgtccacagcgcctgccacagcgccggctgatgcagcacgctcagcagattgctgttcagcccgtcgcctatcaccgccagcagcggcggcagcagcagtaaaagcgccgcgccaatcagcgccgcgtcgcacagccggctgtacagccggtcgtcgggatcgcgccagccgcgaatatggctggccccgatggcgagggctttactcaggcgctggctaagcagcaccagcccgaggcagcagaccatctggataagcgccagcatcgccgcgcgcgccgggtcgtagtcgaaattaagggcctggtaaatcgccagttcgatggtggtcgcccgcgggccgccgcccagcgacagcacggtcgcaaagctggcgaaacagagcataaagatcagcgccgcgaccggtggaatttgccggcgcagccacggccactcgaccagccggaagaagacgtagccgcgcatgccgagctgggcggcgatttgccgctgttcgccggggatattttccagcgtctgcagcagcaggcgcgtggccatcggcatattaaagaatacgtgcgccagcaggatcccctgtagcccgtagggcgtgaattcccactgccagccaaaaacgtggcatagctgggccagccagccctgacgaccgtagacgctaagaatgccgaagaccgccaccagtaccggcagaattaaggtcatcgcgcaaaggcgcagcagcagcgtgcgccctgggaagcgacgccggtacagggcgcgggcgaggaatatcgccggtagcaccgaaaaaagcgcggaaaggaaggcctgccagaaggagaaacgcaccacgtgccagagatagctgtcgcggataagcgcgttccaggaggtctccggagcgctgaaccatagcgccagaaaggcggccagcgccacgacgaccagcacgatggccgccgtgagtcccggcaggagccagccgaaagctagcggctgacggcgcgttgccatgcgctaatccagttctgacgttcggcggccacctgttgcggtgtgaattcgagggtcgtttgcggtttcatcagcgcgtcaaagcctgccggaagcgcaaccgtcgtcaccggatacatccagttgccggtggggatcgcgttctggaagcccggcgataccataaatttaaggaacttttccgccagctccggctgtttgctggccgcggtgcgggcggctacctcaacctgcaggtagtggccttcagcgaagtttgccgcggcgtagttatcttttttctcttcgataatgtggtaagccggggaggtggtgtagctcagcaccagatcgctttcgcctttcaggaacaggccgtaggcttcgctccagcccttggtaacggtaacggttttcgccgccagcttctgccaggcttccggcgctttattgccgtagactttttgcatccacagcagcaggcccaggcccggcgtactggtgcgcggatcttcataaatcacccgccatttttgctcgccctcaaccagctctttcaggcttttcggcggatttttcagcttgtttttatcgtaaacaaaggcgaagtagccgtaatcgaacggcacgaaggtgtcgttgtcccagccgccgggcacgctgaccgcgctggccgggacgccgcttttggcgaacagcttgctttgcaaagcggcttccagcaggttgttatccagccccagcaccacgtcggctttgctgtttttgccttccattcgcaggcggttgagcagcgagacgccatcttccagcgccacgaacttcagctcgcagccgcagtcggcttcaaaggcttttttaaccgccgggcccgggccccagtcggcggagaacgagtcgtaggtataaacggtgagcagcggtttggcaaaaacgggcgcggcgaccagcgccagcagggggagtaattttttcaacactttgcacctcagaaaaaggggtggcaaaggattttgagagggcctcaaatcccttcgccggcgttatccggatcaggttcgacgggtattttctcagcccatacgctttatcttcgggttgcttctgcgctaaccgcgcgttgaggcaacttgaatgagattgcgtatgtttattagcaccccgttgagaacggcagttagtgtaatgattttgtttgccaacggaaagcattacggctccggcggcgcgaaccacgcggacttaaagtcaaaccagccgagcgtgttcatgcgtacgccgcgcatgctgcgctgcccctggatcatcagccagtggtggatcagcggcaccacggtttgattggccaacagctgctgactccaggtggccgggttcagctcgcccgcgcgccagcgagcggcgtcctgttcccagtcgatggggatacagttgcgaatcagcggaacttcatacagccaggcaaacagggagaaatcgatcggcagcgtaaagttggcgctgttgagccatacgtcgctgaccacctccccgcggtgccactcctgatactccagctcctggatctccagtttaacctgatgctcggccagcagcgttgccatgatcccgcccatcacgcgatgctcgacgtgatcctggtagtaggtcagcctgaccgtctcaaggccggcaggcttctcgcaggcgtggctgcgcgcatgatgccagcggggcagcaggccatacgccgggaaccagttgccctgatagtgctcgcccgcgtgatagagcaggttagcgggctggaacacatagcttagccactggcgtaccgcgctgttaccgcccagcgggctgcgggcgtcgaacagcaggtaataacacccctcttccaggcggctttccaccgctttttcgctttgcgtggtgccctgtaacgtcaacccgccgttgggttcttcgctgatttccggcaggacccagacgttcacttcatcgatcagcgcccggtagccgaaatagtcatcgaaggcgtgaattttgagctgattctggttattacgcacaaccgagtagggcccggtccccacggggatactggagaaattctccatcgttcgccactcatgcgggaggatcatggccgggacctggcttaacaaccacggcagccagcggtcgggctggcggagatgaatgtcgagggtccatgcggtgggagagtcgatgcgctcgatatgagagaacagcggcagggcgttgctgcgctgcagagaggtaatgacatcttccatctccagctctcgtccatgatgaaaatgaatccccggacgcagaaaaaagcgccagtgggtgggggcgatctgctgccaatggtgagcaatatcggcctccagttccccattttcctcatttacccgcgtcagggcgctaaaaatctgccgggcaatatgcgtttccgagcggcgcagcgcgctgccgggcagcagatttttcatcggccgatagtagagcacgcgcaggatatgccggccctgacgaaagctgcggcctaaatgggaaaccagcatttgccggacggcggctttatcgccaaccagctgcaccagctgatcgattctgtcctgatccagcagatcttccgccctctgctgctgcagggcgagaccggtatagagaaaagagaggcgggagcgcttgccgcgcccggcctccgcctcccaggtcagccagccgcgcgcttccatcatgttgagcagggtacgcatatggcggcgcgagcagcttagcatctctgccagcgcattcagcgtggtctcctgcgacttgccatcgcagcactgccacaggcggatgaactgctgttgtaaacgaccggaagacataaaaggggaactcctgataaaaactcagcaatttattacttcctatattaagtcaataatcaacatcgatgaagcgaggaggtgaatatgatggggtcaaccatgaaacagttctaccaacgctacttttctgcgacgcaggatgcgtcctggctggcccgcctgatggcaggaagacagcagaaaatgctcggcgagctgatgcagtggggagttacgtcgcagacctcggatcattgacttgcagacatcatgtgtgactgagtattggtgttatactcgtcgtctttcaagctgcaggtgcgttggctgcgcccgctcgcccaggccacatagttatctatgtttccagtgacttacgttctggccgcctgcccgcaactcgaaatccatagagtatagaatcacccgccagcagaatacttctgctggcttttttcgttttcttcgcgtgcttaaggatatttcatgctgtggttaatgacgatggggcgtcgtctaaacggcgtttacgccgcttttatgcttgtcgctttcatgatggggatcgccggcgcgctgcaggcgccgacgctcagcttattcctcagccgcgaagtgggcgcgcagccgttctgggtaggactgttctatacggttaacgccattgccggcattctggtcagcctggcgctggctaaacgctccgacagccggggcgatcgccggcggctgattatgttttgctgcctgatggcggtgggaaacgcgctgctgttcgcttttaatcgccactatctgacgctgattacctgcggggttatgctggcctcggtggcgaatgccgcgatgccgcagctttttgccctggcgcgggaatatgccgatagctcggcgcgcgaagtggtgatgttcagttcgataatgcgtgcgcagctttcgctggcgtgggttattggtccaccgctggcttttatgctggcgctgaattatggcttcaccaccatgttttcgattgccgccgggatctttgttataagcctggcgctgatcgccgtcaaactgccctcggtcgcccgcgttgagcagccttcggaaggcgctgacgtgctggtgcaggccggaggatggcacgataaaaacgtgcggatgctgtttatcgcctccacgctgatgtggacctgcaataccatgtatatcattgatatgcctctgtggatcagcagcgatcttggcctgccggacagccttgcggggattttgatgggcaccgctgccgggctggagatcccggcgatgatactggcgggctactacgttaagcgctggggcaaacgcaagatgatggtgacagcggttgcggcgggcgtgctgttttatatcggtctgattctgttccacgaccgcgtggcgctgctggtgctacagctgtttaatgccgtatttatcgggattgttgccgggattggcatgctgtggtttcaggatctgatgcccggacgggcgggcgccgcgacgacgctgtttaccaacagtatttccaccggggtgattctggcgggggtgattcagggcgcgctgtcgcaaagctatggtcacgccagcgtctactggacgattgccgcaatttcgctggtgacgctgtttatgaccagcagggtgaaagatatctgaatcgccacccctgtcccggcaggatgccgggacaggggctggacaggttatttcaacacgatccttttaatatcgccgataataaaaacatacgcgataacgccaaccagcgcggttaaaccgatataaatcagcgcatagaaaaaattaccggtcatggatatgataaccccaataattaatggggtaataattgatgccatattagcacagaagttgaaaatgccgccggtcaatccgcccatattcttaggggcaatgtcagaaataagcgtccagccgaggccaaccataccctggccaaaaaatgcaatcgacataataataatgacagcggtgttgctatcgacccagttagcaatgatgatgcagctcgacagtagcagtccggaaataattggcagctttctgctaatatttactgagttggttttctttattattttatcggatacccaaccgccgaaaaagataccgatagccgcggccaggaacggccaggaggcgaagaaacccacgtgaagccaggggaggtggcgttcgttagccagataagtcgggaaccatgtcaggaagaaaaccagcgtggtgttaccggcaaattgaccaaggctggcgccgatgatttgccggcagcacagcagacgtttcgcatcatgccagttgaaagggatattttcattgacgcatgccgtattttctacgccgatatactccagctcttctttatttgccgtttttgattcatgtggctcgtgataaaacttccaccatacaaaagtaaacgcaatacccaacccaccggtcaggaaaaatagcgttctccagccatgatgctccagaattaaaaaaaggagcggagagaatgcggccaggccaatatattcaccgacggtgtaagtcgccgttgcccgggcgcgttcatgctgcggaaaccatttactgacgacacggctattaaccgggaaacagggggcttcgctgatgcctaagcctaaacgcagcagcagcagcgattttaggccgacagaaaagctttgcagtaaggtaaaggttgaccagaaaaaaatagaaagcgcgtaggtcagcttattgccgaagcgatcgagaaacatcccgccgggaatttgcgccagagcgtaggtccaggcgaaagcggaaaaaacgatccccatcatggccgggtcaatatctatttcgctcgttaacttgggcgcaacaatacctaaaatagtccgatcgagataatttatcatcgtccctatcgatagtaacattaaaattacaattcgcgttttagttcgcttttgcgtggccgacggcaaaatcggccgttcctgagcatcgatcgtcctcatagtgatttcctttaaagtttaaaatatttttgcatgaatttatgcaggcaaaaatattctatttgacgttgacgctatcgatgataagtcacgctttgttacggcttctgtgacatggcataacaatatttgatataaccccgatatttctccttttcggctcatcatcgatagcctgtatggtatattaggggcatgagttttattcttatattatacgagcaaaaataatgaacctaaagcaactttattattttaagcggctggcagaaaccgagcactacactgaagctgcctccagtctttttatcactcaaccctcgctaagccacgccatatctgaactggagaaagagcttggcgtggcgctatttgccaggaaagggcgtaatgtcaaaattacgcagaatggtaagcgctttctgccctacgtcgaagatgccctggcctcattagagaatggccgcatgacgttgcaaaaaaatagcgacgagaacaaggagaatattcgcattgcgtttatttacaccatgggcgaatatgttgttccgcagttaattaataaatattcactttcaccatctcgtcacaatgtgacattttcttttactcagggaacgtcgttaacgcttctgcaggaactgaaggccgggaaaagcgacctggcgatttgttcctatattgcggatgaacctgatatcgactttattcctattattcagcaggagctggtcgtggtgacggcaaaagatcaccctctggccaggctctatgaaaatgaagtcgacctggtggagactatccactatccctatatctatttttcagaaaatagcgggttacgcccctttattgataacgtgtttatgcagcaaaagctggtgccggatattgcctgctacgttgatgaggatacggcgatggcggggctggtcagtattgattacggtattgcgattatgccgcgaatttccgcgctctcgtattacaacgtgcatatcctgacgattaaaaatgcgattcctccgcgttatatctatctggcaacgatgaaagagcgggtactttctccggcgattcagtcatttaaagatgtcattattaatgacagccaaaaaatccgctagcaacatcgcccggagggtgacccccgggcgaagttttatcaggaaagaatatccatcagttcacgcagttgggtaatggcgatttgccctggcgcagaagcctggccgacggtaccgaaggtcattgctgaaccgaacaaacggccggttacccggctcacgccgccggatttacccatcgacatggtgattaacggccgagtcgcgtacttctctttcatcgtcagggttgccgagagcagggtcaggacatcctgcggcgactgcggcataaccgcgatcttcggcaggtcagcgccaagatcctgcatgcggcgcaggcggtagatgatatcttcctgagccggcgttttatggaaatcgtgattgctcatgataactttgacgcccgcagcgtgggcatcgctcaccagcgagcgaatttgcgcttcgtcattaaacagctcgatatcaatcacgtcggtcagaccgctaacggccgcctggcgattcagctcaaaataggcttcgtcgctgatttccgtttcgccaccctcttttttactgcggaaggtgaacagcagcgggatctctttcagcagctggcgaatctcgcccagcgccagtagtacctgctccgtttctctgacctgggtgaagtgatcgacgcgccactcgataatatcggctccggcggtagccagcgcgcgcgcgttagtctgcagctcggcgagcgttttgccgatcagcggtacgcagattaaggtttccccttcctggaaggtgatgttttttactgttactgcttgagtcatgttggtatccattattctttttgtcattgaccatcaggcggttgctgcaacccgggatgtttttgcagcggcgcgaacctgaagctgacgataaccgatgtacagggcgatcacaaagccgacgatcgcgatcagaagatcgaaccacataatgctggcaatacctatcttcgacagttttgccgtgatcagcgggatcgtaaagctggccagacttcctgcggtataaaagatcccggtggctttgccttttccgttcgggaagctcatggccataatggtcgcgcctatctgcagcacgccgccggcggcggcaaagccgatgataaaggcgaagccggtcactatcattggcgtagggaacaggcaaacgatcagcagtgacatcatcgacaggaaagtgtaaacgatcatggcgacggccgagctaaatacctctttgacaaaggccgcggtgacgaacacgcacgtcagggaaccggcagtatagacgctcaggagtttaatggccgactcgtgcgggatgccggcaacgaactcgccgtactgcgctaaccactggctgaccagataaaaagtcgccataccgatatagccgtacagggtaaagatggccatatccagcttgccggcgttcgcctgcggggcaacggcggcggccgacgatttttctgcggtttcctttttcgcccgatggtccgggaaaggcatttttatcaggtagatagcgctaataatcatcaatacggcggcgatgataaacgaccatccgtaccacatattcgcccaaatcagcgcaccgataatgaacggcagcaggaactgcccggcagagacaaaggctttgatcagcacatttgcccggctggcggagttagggaaggcttccatcagcgccggataggttccggaatcgaggaagctgtttgccagaccggccataatgccgaagaagtaggccatataaatgtttttcgtcagcagaataccgaggaaaaacaccagatagctggcgatgccgagatagataaaaggtttacggccaaaacggtcggacaggaatcctgtgacgatcgtggcgagcttaccgatcccgagcgacgaaatgacgatggagacgccggcagcgtcggtcccccactgttcctgcagattcgccatattgagggtgattaacaaaacccccatgccgtggatcaggtagttaagatagagcccagccgccgttgggacatatggatttttcatcgcgaccatccttagaacaggatacttttgatgtgttcaaccggcatttctttgcccgtccagatttcaaaagcgcgcgcgccttgccagagcatcatccccagaccgttgatggtgcggcagccttttttctcggccacttccagcagataagttttgcgcgggttgtagaccacgtcagacacgatcaggtccgggcgcaggaagctgtcgtcaggcagcagcatctggccttcaaacggtttcatgcccacgccggtggcgttagtcagaatgacgctgctgtcgatttccgcgcgcagtttgtcatgatcgtccagatcgaacaggtggatctcgcagttggtgttattacggattttggcgacggtctgttcggcattggcgaagaatttatctttgcggttaaagatggagatcgctttgacgccatcgagcgcggcctgaacgcagagcgcggttgccgcgccgccagcgcccagaacggtcatttttttgccgatgatatcaatgccctcttctttgagcgcgcgcatatagccggtgccatcggtaatgtggccggtcagtacgccattgtcgttcaccacggtattcaccgcgccaaccagttctgccgccggcgagagcttgtccagatactggcaaatctccgttttgttcggcatggagacgttacagccgcgcagttttaacgcgcgaaagccctgaacgacatctttcagcgtttcattacccacttcgaaggccaggtaaacgtagtccagccccagatgggcaaaggcttcgttatgcatggttggcgacatgctgtgacgaatcggggtcgcaatcaggccaatcagctcggtatgtccggtaatacgttctgccatgataaaatcctcaatatgttagaaatggaatttttgtcgattcgcggttgccgagagcccccatatcttcgagggtgtccagcacgttgcgcccttcgcgcacgccatcaatgattcgccgggccatcaggctgtcgccgatgttcattatttttacgttattggctctggcccattgttcaatctcagtgagaccggcggtgttggcgcgcattcccaggcagacgaagccgtaatcgaaaggaatgtcgaaggtgccatccgcatttttaacggtgaaatgcgtcggggtgacggcaaccagctgcgtgcgcatgtgctgttccacgtgatgttcatccagcatggtcaacatggcgtttttggtaatgatgtccagatcgcgacccggcgcgtcctgcatctcgataagcacggcgctggcaccgcgcgcggagaagtactcgataacgtccagacccacggcgcctgcgccgacgacggcgatgcgtttacctgtagcatcggcaaactggtccagatgatgaatcatgttggtaatggagaagacgttcccgccttcgacatcgatgttctcgcgcagtccttcaatgggcggcagcaggggcactgaaccggtggcgttgacgattaaatccgggcgaagagcggaaacggacgccacggtggcgcgtttgccgacctgcagcatcaggttatcgagcgaggcgatacggtttttcataaactgcggaaaatcagcgatacgctttttctccggcagcagggagatctcgctggccagtccgccgatgctgtgcttctcttccagcagccaggtatgacagccgacttcagccgcggtgcaggccgcttccattcccgccgtacccgcgccgatgaccacgacgttggtatcgcggatcacgcgctgctgcttatacgcgtcgccgtggatgatatccgggttgatcgagcagcgaagagggcgggagcgggcgatgcggtgatccgcgcagccaatgttgcaggagatgcatttccgcatcaaacgttcgttgccgctttgaactttttgcacccactccggctcggcgatcaggccgcggccaatggcaatcaggtcggcatcgccgctggcgataatatcttcggcgactttcggggtacggatgttgccggcaatcaccgtgggcttgtggaatttgtcgcgtaccgcacgcgagaggtagcgcttccagccatcttccagagacatctggtcaatctggaaattgaggttgtcgttttgcgcggcggagacgttgataatatccactttttcctggcacagttcgaggatccgcaaggagtcttcgagcgtatttccacctttcagaaagtcatcggcgctaatacgcaggctgaccggaaaacgcggacctacgcaggcccgaaccttatcgacgattaaggttaatattctggcgcgattctctacgctgccgccaaattcatcggtgcgcttattaaacagcggtgataaaaactggctaattaaataagagtggccggcgtgaatttccacgcagtcgaatccagcgcggcgaacgcgctccgccgcgtcaccaaatttatcgacggcatgatatatctcatcgtgcgtcatcgggcggggaatattcccgttctttttggacggcgtgctggaagaagacagcggcatttcgccgttcaggcgatacgcataggccgacgcgccggcgtggtttaattgaatactgacgcaggcgccgtgtttatgtaaggtttcggttaatttgaacaggcgcggaatatattgatcgttatcgatacgcagctgcgtagtgccgttagaggcgaaaggaaaatcgatgcaaatattctcgatagtgatgagtcctgtgccgccccgcgcgcgtagctcatagtagtcaatctgctcctgcgtgacttccccgttcaggctcgccaggttggtgcccattggcggcatgatgatgcggttttttattgtcattccgttaatggtcaacggggaaaaaagatggggatagtggctcatatgctctctccactggatgcctgatggccttttacggcgattctggcctgtccaaagttaatatttctctgtgggaaagataacgaggcgtttaatagaaaaataatgcttttttttgcgcggagctatagcgtgattctatgggattaacaatttatttacacattggtgtttttaccttaaatatttcaatcgattttttacttgtacttgtggaatgacacaaaaatagtaggggaatgattgaatagatgcccaattgataatgatttatttttatcgcggcaaaaatgtcgccccgtgatagcgacgaatattgatatatgtgcgccagatctcatttttaccggcgaaaaaaaagcccggatcgcggtccgggctgagatatacatggcggctgccttaattcataaaggccggctgttttttctcataggctgagatcgcctcttcatgctgcaaagtcaggccgatgctgtccagaccgttcagcatgcagtggcggcggaaagcgtcaattttaaagctgtaagatttatcgcctgctttaaccacttcggcttccagatcgacttcaaacttaatgcccggctgggagtggaccagcttaaacagctcatcgacctgcgcttcgctcagggtgaccggcagcagctgattgttaaagctgttgccgtagaagatatcggcgaagctcggcgcgatgacgactttaaaaccgtaatcggtcagcgcccacggcgcgtgctcgcgcgaagagccgcagccgaagttttcccgcgccagcaggatagaggcgcctttatattccgggaagttcagcacgaattccgggttaggctgttcgcctttgtcgtccaggaagcgccagtcgttaaacagatgggcgccaaaaccggtacgcgtgactttctgcaggaactgctttggaatgattgcatcggtatcgacgttcgcggcgtccagcggaaccaccaggccggtatgttgggtaaatttctctgccatgatggtttccttatttcaagctacggatatcggcgaaatgaccggtaacggccgccgcggctgccatggccgggctgaccaggtgagtacgcccgccgcggccctgacggccttcaaagttacggttgctggtggaggcgcagcgctcgcccgggttcaggcggtcgttgttcatcgccaggcacatggagcagccgggtaaacgccactcaaagccggcttcaataaagattttatccaggccttcggcttcggcctgcgcttttaccggaccagagcctggcacgaccagcgcctgaacgcccggcgcgactttgcggcctttagcgatttcggccgccgcgcgtaagtcttcgatacgcgagttggtgcaggagccgataaagactttatcaatcgccacgtcggttaacggtacgccagatttcaggcccatataggccagcgctttttccgcgctcgcgcgctctaccgggtcggtgaatgatgccggatccggaatgatgtcggtgacggagatgacctgacctgggttggtgccccaggtgacctgcggggcaatctcttccgcctgcagggtgacaacgctgtcaaaggtcgcgccatcatcggtggtcagggttgtccaccaggcgacggcttcgtcaaaatccttgcctttcggcgcgtgcagacggcctttcacgtaatcgaaggtggtctggtcaggcgcgaccaggcccgctttcgcgcccatttcgatagccatattgcacagggtcatacggccttccatgcttaaatcacggatggcttcgccgcaaaattcgacaacatgaccggtgccgccggcgctgccggttttaccgataatcgccagaacgatatctttggcggtgatgcccggagccgctttacctttgacttcgatcttcatggttttagcgcgaccctgcttcagcgtctgcgtagccaggacgtgttcgacttcagaggtgccgataccgaaggccagcgcgccgaatgcgccatgggttgccgtgtgtgagtcgccgcagacgatggtcatacccggcagggtgacgccctgttccggccccatcacgtggacgatgccctggaaagggtggttcagatcgtacagttccacgccgaactctttgcagtttttaattaactcctgcatctggatacgcgccatttcgccggacgcgttaatgtctttcgtctgcgtcgaaacgttgtgatccatcgtggcgaaggttttgcccggctgacgtaccgggcgtttgtgggcgcgcagaccgtcaaacgcctgcggcgaggtcacttcgtgaaccagatgacggtcaatatacagcagcggggtttcgttttgcgcttcataaaccacgtgagcatcaaacaacttttcgtataacgtcttcgccatgattacaccccttcagcgacatagcgggcaatgatatcgcccatttcatcggtactgaccgccgccgcgccgcgcgctaaatcgccggtacgtacgccttcttctaatgcgcggttgatcgcattttcaatcgcggttgccgcgttatcggcatccaggctatagcgcagcagcagcgccagggagaggatctgcgcgatggggttagcgatgtttttaccggcgatatccggcgcggagccgcctgcgggttcatataaaccaaagccttgctcgttgaggctggcggacggcagcatgcccattgaaccggtaatcatggcgcattcgtcagacaggatgtcgccgaaaagattggagcacagcaggacgtcaaactgggacggatctttgatcagctgcatggtggcgttgtcgatatacatatgcgacagctcaacgtcaggatactgcttactgacttcactaacgatttcacgccacaaaatagaagactgcagcacgttcgctttatcaatcgaggtcactttgtggcgacgcttgcgggcggactcgaacgcaatatgggcgatacgctcaatctcaaagcgatgatacacctcggtatcgaacgctttctcatgctggccgctgccttcacggcctttcggctggccgaagtaaatgccgccggtcagttcgcggacgcataaaatgtcgaagccgttagcggcgatatcggcgcgcagcgggcaaaactcttccaggccctggtacagcttagccgggcgcaggttgctgaataatttgaaatgcttacgcaggggcagcagcgcgccgcgctccggctgctccgcgggcggcaggtgctcccatttcggtccgccaacggagccaaacaggatcgcgtcggcctgttcgcagccttcgacggtagtctgcggcaggggagtgccctgacgatcgatggcgacaccgccgacgtcgtgctggctggtggtaatgcgcatatcaaaacggtggcgaacggcttccagtactttcatcgcctggttcatgacttccgggccaataccatcacctggtaaaacagcaatatggtaattcttcgacattacacggtttccttattgttctctttattctgagctttgcgttgcaattctttttcgacttcagcggcgcgccagatattgttcaggacgtgaaccatggctttcgcggaagattccacgatatccgtcgccagacccacgccgtggaagcggcggccgttgtagttcgccacgatgtccacctggcccagcgcatccttaccctgacccttggcgttgaggtcatatttgaccagctcaatctcatagccggtgatgcggttaatggcctgataaatggcgtccaccgggccgttaccgttggcggcctcagcttttgtttcatcaccgcaggccagcttcacggaggcggttgcgatatcgctggagccggactgcacgctgaagtaatccaggcggaaatgctccggttcttcctgctgtttattaatgaaggctaatgcttccaggtcatagtcaaatacctggccctttttatccgccagcttgaggaacgcgtcatacagatggtccatgttatagtcggtgtctttatagcccatctcttccatacggtgttttaccgccgcgcggccggagcgtgaggtcaggttcagctgcacctggttcagaccgatagattccggcgtcatgatttcgtagttttcgcgatttttcagcacgccgtcctggtgaataccggaagagtgggcaaaggcgccggttccgacgatagctttgttggcagggatcggcatattgcaaatctggctgacggtctggctggtacgccagatttcctggtgattaatgcgggtgtgcacattcataatgtctttgcgcactttaatcgccatgatcacttcttccagcgagcagttgccggcgcgttcgccgataccgttcatcgcgccttcaacctggcgagcgccggcgtggaccgctgcgagggcgttaccgaccgcgatgcctaagtcgtcatgggtatggacggagataatggctttgtcgatgttaggcacgcgttcgtacaaaccggtgatgatgttggcgaattcgaacggcatggtgtagccgacggtatccggaatattgatggttgttgcgcctgcattaatcgcggcttcaacgacgcgagccagatcggcaatcggcgtacggccagcgtcttcacaggaaaactcgacatcgtcagtgtagttgcgtgcgcgcttcaccatatagatggcacgttcaataacctcatccaggttactgcgcagcttggtggcgatatgcatcggcgaggtggcgataaaagtgtgaatacggaacgcttccgccacttttaatgattctgctgcaacatcgatatctttttctacgcagcgggccagggcgcaaacgcggctgtttttgatcgtgcgcgcgatggtttgcacggattcaaagtcgcctggagacgagactgggaagcccacttccatgacgtcaacgcccatccgctccagggccatagcaatctgcagtttctctttcacactcaggctggcttgtaacgcttgttcaccgtcgcgtaaggtcgtatcgaaaataatgacttgctggctcatggtttagatccttggtctgtgtcctggcgccttgcttacgagcataaaaaaacccgcgcattggcgcgggttttatagtcttgctggaagatgacttaacgatgaacgtcgcccaacagcctaccgcgcaaaatggatgcgtttagtagtagtaggctgagaaagcgaatgctgcgaatcattgcgtcatgctccagatgaaatcgttatgtatttagagttactggatatggggtttgatgtcaacccttgggtgaacaaaaggtctttttacccgcgagaagaattagctaattgtgctgacgatcgcgcttttttgccgatgatcctttttaggacatcagcgcatgttgagatattttcactatttgataattttgattttcgctgagagccgcaaggatagcgcgcctggccagaatcatatcttaatgaaatagctgaatttatttgtttgctgaatgtgttcatgtttgtaaaggggtattatcaatgataataaaatgtgaatgttaagggcggcttaaaccgatattgtaatagtgcttaaattatagttaaccgctgctgttattgtttatttttgatatttatgggtacacttggttttatcaagtaaacaatatggttagggggttgcgggtacgttcaactgcagaattttcgtcgccactcataaccttaatatattcctaaaattcatctttgcccttttgtaaatgtcatatgcatggtaaatgatattttcagaattaattactgcactttggcaaagggaatttagcgtgacagtggagttaaatatgttaaaagaaaatactgaatataagccggactcagaggtggaaaacgcaaaacctcagctgagaatggtcgacctgaatctgttaaccgtatttgatgcggtaatgcaggaacaaaatatcacccgtgcggcacactccctggggatgtcgcagccggcggtcagcaatgccgtatcaagactgaaggtgatgtttaatgatgagctgtttgttcgttatgggcgcggcatccagccaacggcgcgtgcttatcagctatttggttctgtacgacaggcattacaattagtgcagaacgagttgccgggctcgggcttcgagccgctcagcagcgagcgggtctttaatttatgcgtttgcagcccgctggataacgcattgacttcggttattttcaataaagttggcgagattgcgcccaacattcatttggtctttaaatcggcattgaatcaaaacacggaacatcaattacgttatcaggaaattgaattcgttattggttatgaagagtttcgtcgccctgagtttgcctgcgtgcctttatttaaagatgaaatggtgctggtggcgagccggaaacatccgcgtatttctggcccaatgatggaaaatgatatttatcaggaggagcacgcggttgtcgctctcgaccgatacgcttcatttagccagccgtggtatgacaccgcggataaacaatcgcgtattgcttatcaaggtaacgcgatggtcagcgtattaaatgtggtttcccagaccaatatggttgctatcgcaccgcgctggttagccagcgagttcgccgataagctggatttgcaaatattaccgttgccgctgaaagtgaatagccgtacctgctatctttcatggcatgaagcggcgggccgtgataaagggcatcagtggatggaagaattgctggtcaatatctgccagcgctaaacggtcgcgatacaaacgggggcttcggctcctgctttgtgtgacaaaaatcactaaacgtagaattttattctgtttgcgattatccgcccccggcgctgcccgttaaaaaatggatgatttgctgtagttggttattttccccgagcattgactatcatattttcttatctccgaagtttttcaccgtgttttagctgcgaacctttcttttatccttttaatgcctcttaggtgccgacggtcgccaattgcctgcccgttagcgagcagttatggtaacggcatgcagtctattcacctcaggacgaagcttttgcgcttcgtcctgtgcgagcgcgcggaaatcggattccgctgtcgttaaaaactataagccgggaggcaaaccatggagatgttgtcaggagccgaaatggtcgtccagtcgctggtcgatcagggcgtcaagcaggtgttcggttatcccgggggcgcggtcctcgatatctatgatgcgttacatacccttggcggaatcgatcacgtactggtccgccatgagcaagctgccgtgcatatggcggatggccttgcgcgcgcaacgggcgaggtcggggtagtcctggtgacctcgggtccgggggcgactaacgcgattaccggcattgcgacggcttatatggattccattccgctggtgattctttccggccaggtcgcgacgtccttaattggctacgatgctttccaggagtgcgacatggtggggatctcccgaccggtggtaaaacacagctttctggttaagcaaaccgaagatattcccggcgtgctgaaaaaagcgttctggctggcggccagcgggcgtcccggcccggtcgtcgtggatctaccgaaagatattctcaatccggcgaaaaaactgccgtacgcctggccagatacggtcagcatgcgctcttataatccgacgacgtcgggtcataaagggcagattaaacgtgcgctgcagacgctggtggcggccaaaaaaccggtggtttatgtcggtggcggggcgattaatgcgcaatgtgaaccgcagctgttcgcgctggttgagaaactgaagctgccggtggcgtcttcgctgatggggctgggcgccttccctgcttcacaccagcaggcgttagggatgctgggcatgcatgggacctatgaagccaatatgaccatgcaccattccgacgtgattttcgccgttggcgtgcgcttcgacgatcgtacaacgaataatctggccaggtactgtccgaacgcgacggtgctgcatattgatatcgatcccacttcgatctccaagaccgttcctgccgacgtgcctatcgttggcgacgcccgcctggtgctggaacagatgctggaactgctcgaacatgaagagacgcagcagccgctggatgaaatccgcgactggtggcagcagattgagcagtggcgcgcgcgtcattgcctgcagtacgacacgcaaagcggcaagattaaaccgcaggcggtaattgagaccatctggcggctgacgcacggcgatgcgtacgtgacgtccgatgtgggtcagcatcagatgttcgcggcgctttattatcctttcgacaaaccgcggcgctggatcaactcaggtggtctgggaacgatgggatttggccttcccgccgcgctgggcgtgaagatggcgctgccggaagaaacggtgatttgcgtgaccggcgatggcagcatccagatgaatattcaggagctctccaccgcgctgcagtacgagctgccggtgctggtgctgaacctcaataaccgctacctcgggatggtgaagcagtggcaggatatgctttactctggccgtcattcacaatcctatatggagtcattgcctgattttgctcgcgtcgcggaagcctacggccacgtggggattcgtatcagcgacccgcaggagctggaagcgaagctcgctgaggcgctggagcaggtgcgtaataatcgactggttttcgttgatgtaacggttgacggcagtgagcatgtataccccatgcagattcgcggcggcggtatggacgagatgtggctgagcaaaacggagaggacctgattatgcgccggatattatcagtattactggagaacgaatcgggcgcgctatcccgcgtgatcggcctcttttcacagcgcggttataatattgaaagcctgacggtagcgccgacggacgatccgacgttatccagaatgacgattcaaaccgttggcgatgagaaagcgattgagcagatagaaaagcagctgcacaagctggtcgacgtgctgcgcgttaacgagcttggacaaggcgcgcacgttgagcgtgaaattatgctggtaaaggtccaggccagcggctatggacgcgatgaggtcaagcgcaatacggaaatcttccgtgggcaaattatcgacgtcacgccgtctatctataccgttcagctggcgggaaccagcgataagctggatgcgtttttggcttcgctgcgcgacgtggcgcgaattgttgaagtcgcccgctcgggcgtagtcggattgtcgcgcggcgacaaaatcatgcgctgagccgctgaaaccgacgtaaaaatagcccgacacagcctgtcgggctatttttttgcgaaatcggtgggaactgtggactaaagcggttgctgcgcttacttttctgcgcttagatgttataaaaacgaatccatacctgaagaatggttatgttctgtacttattacccaaggggcaattgtgaaactggatgaaatcgcccggctggccggtgtctcgcgaacgaccgctagctatgtgattaatgggaaagcgaagcagtatcgcgttagcgataaaactgttgaaaaggtgatggcggtggttcgtgagcacaactatcatccgaatgcggttgctgcaggcttgcgtgcaggacgtacgcggtccattggtctggttatcccggacctggaaaacaccagctatacgcgcatcgctaattacctggagcgtcaggcgcgccagcgcggctatcagctattgatcgcctgctccgaggatcagccggataacgaaatgcgctgcattgagcatctgctgcagcgtcaggtcgacgcgataatcgtttccacctcattaccgcctgaacatccgttctatcagcgctgggctaacgatccgttcccgattgtcgcgcttgaccgcgcgctcgatcgagagcacttcaccagcgtggtgggtgccgatcaggacgatgctgaaatgctcggggcggaattgcgtaagtttccggctgaaacggtgctgtaccttggcgcgctgccggagctttcggtgagcttcctgcgcgagcagggattccgtacggcatggaaggacgatccgcgagaggtgcatttcctctatgcaaacagctacgagcgcgaagccgcggcgcagctctttgaaaagtggctggaaacgcatccaatgcctcaggcgctgtttacgacttcgtttccgctgctgcagggcgtgatggacgtcacgctgcgccgggaagggaagctgccttccgagctggctattgccacttttggcgataatgagctgctggatttcctccagtgtcccgttttagccgtggcccagcgccaccgcgacgtggcggagcgcgtgctggagatcgtgctcgccagccttgatgaaccgcgtaagccgaaacctgggttaagccgtatccggcgcaatctttatcgtcgcggcagcctgaatcgacgctaagcgcgtgaccaggattattcgtagagtattcgccagacggagacgcgtctggcgataatccgctgagatgacgtaaaaattgcagggttaaggatctttcagacaaatccttaatcttcctgacatctcttttaattctattcttcgcgccatttatttcgcggtttaattagcccataaaaggattagcatatttatttgtattattttgttacattcagcgggtgagttgctgaattaacactcatttcctcgctattatggtagcgataagcgctgtaccccgcagtaagagtgcctctcctgtgaaaactggtgctgttaacggtcatcagaatggcctaaaatgccgctcgcgtcgcaaactgacactttatattttcccttcgaagatattttgctgctttaactgttacaagtttgttggttgttttcttaccgatattcataacgttaatttgcctcgtttgttggttgatttttcctcagggcgaatatcggctgtaaataatgggtttttgagctctgttggcatccgtgctggcttgacaagcttttcctccgctccgtaaactccttcttgtgggaatttgtggggtaaagtggcgaaaaggggtgaggctggcatgttccgtggggcaacgttagtcaatctcgacagcaaaggccgtctggccgtaccgacgcgctaccgcgacgggctgatcgagaacgcttccggtcaattggtgtgcaccattgacatccatcacccgtgcctgctgctttaccctttgcctgaatgggaaatcatcgagcaaaaattatcgcgtttatcgagcatgaaccccaccgagcggcgcgtacagcgtttgcttctgggacatgccagcgaatgtcagatggatagcgccgggaggctattaatcgccccggtgctgcggcaacacgccgggctgacaaaagaagtgatgctggtcgggcagttcaataagtttgagctgtgggacgaaacgacctggtatcaacgggtcaaggaagatatcgacgctgagcagtccgcttccggggaactgtcggagcgcctgcaggatttgtctttgtaaaatgatggaaaattataaacacactacggtacttctggatgaagccgttaacggcctgaatattcgtcctgacggtatctacattgatggtacctttggccgcggcggtcactcgcgcctgattctctcccagctgggagcggagggacgcctgctggcgatcgatcgcgacccgcaggctatcgccgtcgcgaaaactatcgatgatccccgcttttccatcgttcatggtcctttttctcagctggccgactatgttggcgagcgcaatctaaccggcaagatcgacggtattctgctcgatcttggcgtctcctcgccgcagctggatgacgctgaacgtggcttctcatttatgcgcgatggtccgctggatatgcgcatggatccgacgcgcggccagtcagccgctgaatggctacaaaccgccgacgaagccgatatcgcctgggtcatcaaaaccttcggcgaagagcgctttggtaaacgcattgcccgcgccatcgtcgaacgcaaccgcgtggaaccgatgacgcgtaccaaagagctggcggaggtcgttgcggcggcgacgccggtgaaagataaattcaaacatcccgcgacccgtaccttccaggcggtgcgcatttgggtgaacagtgaactggaggagatagagcaggcgctaaaaagctcgctcagcgtgctggccccgggcgggcggctctcaatcatcagtttccactcgctggaagaccgtattgtgaagcgctttatgcgcgagcaaagccgcggtccgcaggttccggcagggttaccgatgaccgaagagcagcttaaaaaactgggcggccgtgagctaagagcattaggcaagttgatgccgggcgaaaaagaggtagctgaaaatcctcgtgcccgtagttcagttctgcgtattgcagagaggacgaacgcatgatcggcagagtgacagaagccctaagcaaggtgaaagggtcgataggaagcaacgagcgccatgctttgcctggcgtgatcggagacgacctcctgcggtttgggaagctgccactctgcctgttcatttgcatcattattacggcgattacggtggtgacaacggcgcaccatactcgcctcttaaccgcgcagcgcgaacagctggtgctggaacgcgacgcgctggatattgaatggcgcaacctgatcctcgaagaaaatgctctcggcgatcacagtcgggttgagcggatcgcgaccgagaagctgcagatgcagcacgtcgatccatcacaagaaaatatcgttgtacagaaataaggattattgcgacgcatgaaagcagcgccgaaaacgccaaaagcaaaacgtcaggaagaacaggccaactttatcagttggcgttttgcgttgctgtgcggctgtattctgctggcgctgggcttcctgctgggccgcgtggcctggctacaggtgattagcccggacatgctggtacgccagggcgatatgcgttctctgcgcgtgcaggaagtctctaccgcgcgcggaatgataaccgatcgttccggccgcccgctggcggtgagcgtgccggtaaaagctatctgggctgacccgaaagagctgcatgaagccgggggcgtgaccctggacaaccgctggaaggcgctggccgatgcgctgaatatgccgctggatcagctggcatcgcgcatcaataccaatccacggatgcgttttatctatctggcgcgtcaggtgaaccctgatatggccgactacatccgtaaattgaagctgccggggattcatctgcgggaagagtcccgccgctactatccgtctggcgaagtaaccgctcacctcattggcttcactaacgtcgatagccaagggattgagggcgtagagaagagctttgataagtggcttaccggccagcccggcgagcgtatcgtgcgtaaagaccgctatggtcgggtaatcgaagatatttcgtccaccgatagccaggccgcgcataacctggcgctgagcattgacgaacgcctgcaggcgctggtgtatcgcgagctgaataatgcggtggcgttcaacaaagcggagtcaggtaccgcggttctggtcgacgttaacaccggcgaagtgctggcgatggccaacagcccgtcgtacaacccgaataatttcgcgggcacctccaaagatacgatgcgtaaccgcgccattaccgacgtgtttgagccaggttcaacggtgaagccgatggtggtgatgaccgcgcttcagcgcggcattgttaacgaaaataccgtactgaacaccattccctatcgaattaacggccacgaaatcaaagacgtggcgcgctacagcgaattgaccctgaccggggtactacagaagtcgagtaacgtcggtgtttctaagctggcgttagcgatgccgtcctcagcgttagtagatacttactcacgttttggactcggaaaagcgaccaatttggggttggtcggagaacgcagtggcttataccctcaaaaacaacggtggtctgacatagagagggccaccttttctttcggctatgggctaatggtaaccccgttacagttagcgcgagtctacgcaacgatcggcagctacggcatctatcgcccgctgtcgattaccaaagttgatccaccggttccgggcgagcgcgtcttcccggaatcactcgttcgtaccgttgttcatatgatggaaagcgtggcgctgcccggcggcggcggcgtgaaggcggcgatcaaaggctatcgcatcgccattaaaaccggtacggcgaaaaaagtagggcccgacggccgctacatcaacaaatacattgcttacaccgcaggcgttgcgcccgccagccatccgcgctttgcgctggtggtggtgatcaacgatccgcaggcgggtaaatactacggcggcgccgtttccgcgccggtcttcggtgccatcatgggcggcgtactgcgcaccatgaacattgaaccggatgcgctggcaacggctgaaaaaagtgaattagtgattaatcaaggcgagggaacaggtggcagatcgtaatttgcgcgaccttctcgctccgtgggtgccaaatgcgccggagcgaattctgcgagaaatgacgctggacagccgggtggctgcttctggcgatctttttatcgcggttttaggtcatcaggcggacgggcgtcgttatatcccgcaggcgatagcgcaaggtgttgctgccattattgctgaggccaaagatgaggcccatgacggcgaaatccgtgaaatgcacggtgtgccggttatctatctgagccaactcaacgagcgcttatccgcgctggccgggcgtttttaccatcagccttcggaacaactgcgcctggtgggcgtcaccgggactaacggcaagaccaccacgacacagctgctggcgcagtgggcgcagcggctgggggaaaccagcgcggtaatgggaaccgtaggcaatggcctgctggagaaagttatcccaacggaaaacaccaccggttcggccgttgatgttcaacacgtactctctggcctggcagggcagggggcgacgttcgccgcgatggaagtctcttcccacgggctggtgcagcatcgcgtagccgcgctgcagtttgccgcctcggtcttcaccaacctgagccgcgatcacctcgattaccacggtgatatggagcattacgaagcggcgaaatggctgctctactcaacccaccattgcgggcaggcgattgttaatgcggacgatgaagtcggtcgccgctggctggcgaagctgccggatgcggtcgccgtatcgatggaagatcacattaacccgaactgccggggccgctggctcaaagcgaccgccgtgagctatcacgatagcggcgccaccattcagtttgcctccagctgggggaacggcgagatcgaaagccgcctgatgggcgcctttaacgtcagcaatctgctgctggccttagccaccctgctggcgctgggctatccgcttgccgaactgctgaaaaccgccgcgcgcctgcagccggtatgcgggcgtatggaagtgttcgccgcgccgggtaaaccgaccgtggtcgttgattacgcccacacgcctgatgcgctggaaaaagcgctgcaggcggcgcgtctgcactgtcgcggtaaactgtggtgcgtatttggctgcggcggggatcgcgacaaaggcaagcgtccgctgatgggcgctatcgccgaagagtttgccgatatcgtggttgtcaccgacgacaacccgcgcaccgaagagccgcgggcgattatcaatgacattctggccggcatgctggacgcgggccatgccagggcggtggaaggtcgtgcggaagcggtcactaatgcggtgatgcaggcgaaagaaaacgacgtcgttctggtggcgggcaaaggccacgaggactatcaaatcgtcggcaatcgccgactcgattactctgaccgcgtcaccgtggcgcgtctgctgggggcggtagcatgattcgcttgactctcagccagctcgccggcatcacgcatggcgagctgcacggccgcgatgtggcgattgatgacgtcacctccgatacccgtaaaatcacggcgggctgcctgttcgtggcgctaaaaggcgagcgctttgatgcgcatgactttgccaaacaggcgaaagctgccggcgcgggcgcactgttggtcagccgtcagctggcctgcgatctaccgcaggtggtggtgaaggatacgcgtctggcgtttggcgaactggccgcgtgggtgcgtcagcaggtgccggcgcgcgtggtcgcgctgaccggatcttccggaaaaacctcggttaaagagatgaccgcggcgattctgagccagtgcggcaatacgctgtataccgcaggtaacctgaacaacgatatcggcgtgccgatgacgctgctgcgtctcaccaaagaacatgactacgcggtcatcgagttaggcgctaatcaccagggggaaattgcctggaccgttagcctgacccgtcccgaagccgcgttagtgaataacctggccgccgcgcacctggaaggctttggctctctggaaggcgtggcgaaagccaagggcgaaatctacaccggtctgccgctcaacggcatcgcgattatgaacgccgacaataatgactggctgaactggcaaagcgtgattggcgagcgtaaaacctggcgtttttcgccgaacgccgcccacagcgatttcacggcaaccaacgttcatgtgacgtcgcacgggactgaatttactctgcagaccccaacgggcagcgttgatgtactgctaccgctgccggggcgccataacatcgccaacgcgctggctgccgcggcgctgtcaatggcggtgggggcgacgcatgaggcgatcaaagcgggtctgaaagatctgaaagcggtaccggggcggttattcccgattcagctgaccgacagccagctgctgctggatgattcctataacgccaacgtcggctcgctgaccgctgcggtacaggtgctgtctgagatgccggggtaccgggtactggtcgttggcgatatggccgaactcggcgcggaaagccaggcgtgccatcgtcaggtgggcgaagcggcaaaagcggccgggctcgatcgcgtactgagcgtcggtacgttgagcgcagagatcagcggcgccagcggcgttggcgaacattttagcgagaaggccgcgctggtgacccgcctgcgcgagctcaccgcagaacataaaattatgaccattttagtgaagggttcacgtagtgccgccatggaagtggtagtacgcgcattacaggagaacggaacatgttagtatggctggccgaacatttggtcaaatattattcaggctttaacgtcttttcctacctgacgtttcgcgccattgtcagcctgctgaccgcgctgttcatctctctgtggatgggcccgcgcatgatcgcccgtctgcaaaaactctcctttggccaggttgtacgtaacgatggcccggaatctcactttagtaagcgcggtacgccgaccatgggcgggatcatgatcctgaccgccattgttgtctccgttctgctgtgggcctatccatctaacccctacgtctggtgcgtgctgacggtactggtgggctacggcatcatcggcttcgttgatgactaccgtaaggtggttcgcaaagataccaagggcctgattgcccgctggaaatacttctggatgtcggtgattgcgctgggcgtcgcctttgcgctgtatatggcgggtaaagatacgccggcgactcagctggtggtgccgttctttaaagacgtgatgccgcagctgggcctgttctacgtcctgctggcctattttgttatcgtcgggaccggtaatgcggtcaacctgaccgacggccttgatgggctggcgattatgccaaccgtattcgttgccgccggcttcgcgctggttgcctgggcgaccgggaacatgaatttcgccaactacctgcatatcccttatttgcgtcacgccggtgaactggtgatcgtctgtacggcgattgtcggcgcgggcctgggcttcctgtggtttaacacctatccggcacaggtctttatgggcgatgtgggttcgctggcactcggcggcgcgctggggattatcgccgtgctgctgcgccaggaattcctgctggtgattatgggcggcgtatttgtggtggaaacgctctcggtgattctgcaggtcggctccttcaagctgcgcggtcagcgcatcttccgcatggcgccgattcaccatcactatgaactgaaaggctggccggaaccgcgcgttatcgtgcgtttctggattatttcgctgatgctggtgctgattggcctggcgacgctgaaggtacgttaatcatggcagattatcagggtaaaaaagtcgtcattattgggctgggtatgaccggcctgtcatgcgtggactttttcatggctcgcggcgtgacgccgcgggtgatggatacccgcgttgcgccggcggggctggacaagctgccggaagccgttgagcgctatgtcggcggtctgaacgaagactggctgttgacggcggacctgattgtcgccagccctggcatcgcgctggcgcatccttccctgagcgccgcggcggatgcgggggtagaaatagtcggcgatattgaactgttctgccgcgaggcgcaggcgccgattattgcgatcaccggttccaacggtaaaagcaccgtgacttcccttgtgggagaaatggcgaaagcggcggggttgaacgttggcgtcgggggcaatattggcctgccggcgctgatgctgctggatcctgagcgcgaactctatgtcctggagctttccagcttccagctggaaaccacctccagcctgcgggcggccgcggcgacgatccttaacgtcaccgaagatcatatggaccgctatccgctggggcttcagcagtaccgcgccgccaaactgcgcgtttatgagaacgcccgggcctgtatcgttaatgccgacgatgcgttaaccatgccggtacgcggcgctgacgatcgctgcatcagcttcggcgttgacgttggtgactatcacctgaaccgccagcagggagaaacctggctgcgcgtcaaaggcgagaaagtgctcaacgtcaaagagatgaagattagcggccagcataactacagtaacgcgcttgcggccctggctctggcggacgcggcgggtctgccgcgcgccagtagcctgaaagcgctgaccacattcaccgggctggcgcatcgtttccaactggtgctggagcacaacggcgtgcgctggatcaacgattctaaagccaccaacgtcggcagtactgaagcggcgctcaatgggctgcatcttgatggaacgctctatctgctgctgggcggcgatgggaaatccgctgatttcacgccgttaagccgttacctgaccggcgacaacgttcgcctgtactgcttcggccgcgacggcgcgcagctggcggcccttcgcccggacgtcgccgtgcaaacggaaaccatggagcaggcgatgcgccagattgcgccgcaggttgtcgcgggtgatatggtgctgctgtctcccgcgtgcgccagcctcgatcagtttaaaaactttgaacaacgcggcgacatctttgctcgcctggcgaaggagttaggttgatgcgtttatcactcccgcgcctgaaaatgccacggctgagactgccgcgtctgccgggaatgtttattttcgcatggctgttcgccgcgctgaaaggctgggtgatgggctcgcggcaaaaagataccgatagcctggtgatgtatgaccggatgctgctgtggctgacctttggcctggccgcaatcggcttcattatggtgacctcggcgtcgatgccggtaggccagcgtctggcgaacgatccgtttctgtttgccaagcgcgatggcttatacattctgctggcgctagggctggcgatggtgacgctgcgcctgccgatggagttctggcagcgccatagtaccgcgatgctgatcgcctctatcgtcatgctgctgattgttctggtggtcggtagctcagttaacggggcgtcgcgctggattgcgctggggccgctgcgtatccagcctgcggagtttaccaagctgtcgctgttttgctacatcgccaactacctcgtgcgtaaaggcgacgaagtgcgtaacaacctgcgcggcttcttaaagccgatgggcgtgattttcgtactggcgattttactgctggcgcagcctgacctcggtaccgtcgtcgtgctgtttgtgaccaccctggccatgctgttcctggcgggagccaagctgtggcagtttatcgccattatcgggatggggctttcggcggtcgtactgctgattctggctgaaccgtaccgtatccgccgcgtgacctctttctggaacccgtgggaagatccgttcggcagcggctaccagctaacccagtcgctgatggcctttggtcgcggcgaaatgtgggggcagggcctgggcaattcggtccagaagctggagtatttgcccgaggcgcacaccgatttcatcttcgccattatcggtgaagagctcggttatatcggtgtggtactcgcacttttaatggtattcttcgtcgcttttcgcgccatgtccattggccgcaaagcgctggagattgaccaccgtttctccggatttctggcctgcgccattgggatctggtttagctttcaggcgctggttaacgtcggcgcggcggcggggatgctgccaaccaaaggcctgacgctgccgctgatcagttacggcggttcgagcctgctgattatgtcgacggcgatcatgttgctgttacgaattgattatgaaacgcgtctggaaaaagcccaggcgtttacacggggtgttcgatgagcggtcaggaaaagcgcttaatggtgatggcaggcggtaccggcggacacgtgttcccgggactggcggttgcgcaccatttaatggaccagggctggcaggtccgctggctgggtaccgcggatcgtatggaagcggatttagtgccgaagcacggcattgaaattgatttcattcagatatccggcctgcgcggcaagggcctgaaggcgcagatgctggcgccggtgcgtattttcaacgcctggcgtcaggcgcgagcgattatgcagcgttttcagccggacgtggtgctgggcatgggcggctatgtttccggacccggcggtctggcggcatggtcgctggggatcccggttgtcctgcatgaacagaacgggattgccggcctgacgaataaatggctggcgaaaattgccaaaaaggtcatgcaggcatttcccggcgctttcccgcatgccgacgttgttggcaacccggttcgtaccgatgtgctggcgctgccgctgccggaacagcggttagtcgggcgtcaggggccgattcgcgtattggtcgtcggcggctcgcagggcgcgcgcgtgctcaatcagacgatgccgcaggtggcggcgaagctgggttctgctgtcaccatctggcaccagagcggtaaagggggccaggagagcgtacagcaggcctattccgacgccggccagccgcagcacaaagtcaccgaatttattgacgacatggcggcggcttatgcctgggccgatgttgtcgtatgtcgttccggggcactgacggtgagcgaaattgccgccgcgggtttaccggcgctgtttgtgccttttcagcacaaagatcgtcagcagtactggaatgcgctgccgttagagaaggcaggggcagcgaagatccttgagcagccgcagtttaccgtggaggccgtcacgcaaaccctggcgggttgggatcgcgagacgctgctggatatggcggagcgagcgcgcagagcctcgattccggacgcgaccgaacgggtagcagaagaagtgagcgccgcagcactggcgcgttaatcgcggtgatgatcaccgtccgaataaagaagttgatggcgtaaagaatgaatacacaagatctggcaaaactgcgttctatcgtgcccgagatgcgtcgcgtccggcacattcactttgttggcattggcggtgccggcatgggcggtattgccgaagttctggccaacgaaggttatcagattagcggctccgacctggcgccgaatccggtgacccagcagttgactcagcttggcgccacgatttatttcaaccatcgccctgaaaacgtgcgcgatgcgagcgttgtcgtggtttccagcgcgatttctgcggataacccggaaatcgtcgccgcccacgaagcgcgtattccggttattcgccgcgccgagatgctggcggagctgatgcgttttcgccacggcattgccattgccggcacgcacggaaagaccacaaccacggcgatggtctcgagcatttacgctgaagccgggctggatcctaccttcgtgaacggtggtctggtcaaagccgctggcgtgcacgcgcgccttggccatagtcgttacctgattgccgaagcggacgaaagcgacgcctcgttcctgcatttacagccgatggtcgctatcgtgaccaatatcgaagccgatcatatggatacctaccacggcgacttcgaaaacctgaagcagacttttattaacttcctgcacaatctgccgttctacggacgcgcggtgatgtgcgtggacgatccggtgattcgtgaactgctgccgcgcgttggccgccagctcaccacctacggatttagcgatgatgccgacgttcgcgtggaagagtatcgtcaggttggcgctcagggccatttccgtctggttcgccaggataaagaggtcattcaggtgacgctgaacgcaccgggtcgccacaacgcgctgaacgcggcggcggcggtggccgttgccacggaagagggcattgatgatgacgctattttgcgcgcgctggaaagcttccagggcaccggccgtcgctttgatttccttggcgaataccccttagctgaagttaacggtaaagagggtaccgcgatgctgatcgatgattatggtcatcatcctacagaagtggatgccaccatcaaagcggcgcgggcgggctggccggataaaaacctggtgatgctgtttcagccgcaccgttttacccgtacgcgcgatctgtacgatgatttcgccaacgtgctgacccaggttgacgcgctgctgatgctggacgtttattccgcgggcgaagccgctattcctggcgccgacagccgctcgctgtgccgtacgattcgcggccgcggtaaagtcgacccgattctggtttccgacccggcgcaggcggcagagatgctggcttcagtattgaccggcaacgatctggtgctggttcagggggcgggaaacattggtaaaatcgcccgtcacctggcggaaatcaaattgcagccgcaaaaatcgcaggaggagcgccatggctgataaaatcgcggtcctctttggcggaacctccgctgaacgtgaagtctctctcaattcaggttcggcggtgctcgccggcctgcgcgaagccggggtcgatgcgcacccggtcgacccgcgcgacgtggatattacccaattgaaaaatatgggttttcagaaagcgtttattgccttgcacggtcgcggcggtgaagatggtacgttgcagggtctgctggagctgattcaactcccctataccggcagcggcgtgatggcttccgctatctcaatggataagctgcgcagcaaactgctgtggcagggcgccgggctgccggttgcgccgtgggttgcgctgacgcgtaaacagttcaccgcggggctttccgctgaggtagaacagcagatttccgccctcggactgccgttgattgttaaacccagtcgcgaaggctccagcgtcggtatgtccaaagtcagcgaaagttgtgcattacaaaatgcattggcgctggcttttcagcatgatgacgaagttctgattgaaaaatggctcagtgggccggaatttaccgtcgctatcgtcggagaagaaattttaccgtcaatacgtatccaggcggctggaaccttctatgattatgaagcaaagtatctctctgatgaaacgcaatatttctgccctggcctggaagattccgcgcgcgaggcagaaatgcaggctctggtgcaaaaagcctgggatagtcttggctgttacggctgggggcgaattgatgtgatgctggacagcgatggccagttttatctgctggaagcaaacacctctcctggcatgaccagccatagtctggtgcccatggcggcgcgtcaggcagggatgagcttctcgcagcttgttgtacgaattctggacctggcggggtgatatgtcgcaggctgcgctgaatacgcggaaccacgaagaggaagacgaaacctcttcgcgtcgaagtaatggctctcgtctggcgggtatcttcttcctgctggcggtgctctgtaccgtgctggtcagcggatggatggttctgggctggatggaagatgcacagcggttaccgctgtcaaagatggtggtcaccggtgagcgtcactacacgcgcaacgatgatatccgtcaggcgattctggcattggggtcgccgggcacctttatgacgcaggacgtcaacattattcaaagccagattgaacgtctgccgtggattaagcaggcgagcgtcagaaagcagtggccggacgaattgaagattcatctggttgaatatgtgccgatagcgcgctggaatgatcagcatatggtagacgtggacggaaattctttcagcgtgccgtcagatcgcaccagtaaacagaatttaccgatgttgtacggcccggaaggcagtgagaacgaagtccttcagggataccgcgacatggggcaggtgctggcgaaggataaattcacgttgaaagtagcggcaatgaccgcgcgtcgctcctggcagttgacgcttaataacgacattaagctcaaccttggtcggggtgacaccatgaaacggcttcagcgctttatggaactctacccggttcttcagcagcaggcgcagaccgacggcaaacggataagctacgttgatttgcgttatgactcgggagcggcagtcggttgggtaccggctcctgtagaggaaactcaacaacaacagaatcaggcacaggcagaacaacaatgatcaaggcgacggacagaaaactggtagttggactggagattggcaccgctaaggttgccgctttagtaggggaagttctgcccgacggtatgattaatatcattggcgtgggcagttgcccatcgcgtggtatggataaaggcggagtgaacgacctggaatccgtggtgaaatgcgtgcagcgcgccattgaccaggccgaactgatggcggattgccagatctcgtcagtctatctggcgctttcaggcaaacatatcagctgtcaaaatgaaatcggtatggtgccgatttctgaagaagaagtgacgcaggacgacgtagagaacgtggtacataccgcgaaatcggttcgcgtgcgcgacgagcatcgcgttctgcacgttatcccgcaggagtacgccatcgactaccaggaggggattaaaaaccccgtaggactgtctggcgtacgcatgcaggcgaaagtgcatttgattacctgccataacgatatggcaaaaaatattgtcaaagcggtggagcgttgcggtctgaaagtcgaccagcttattttcgccggtttagccgccagctattccgtattaacggaagacgaacgtgaactgggtgtctgcgtggtggatatcggcggtggtacaatggatattgcggtctataccggcggcgcgctgcgtcataccaaagtgatcccgtacgcgggcaacgtggtgaccagcgatattgcctacgctttcggtacgccgccgagcgacgcagaagccattaaagtgcgtcacggctgtgcgctgggttccatcgttggtaaagacgagaacgtggaagtccccagcgtaggcgggcgtccgcctcgtagtctgcagcgtcagacgctggccgaggtgattgagccacgttataccgaattgctcaacctggtgaatgaagagatcctgcagctgcaggaacagctccgtcaacaaggtgtgaagcaccacctggcggctggcattgtattaaccggcggtgcggcgcaaattgaaggacttgccgcctgcgcgcagcgcgtattccatacgcaggtgagaattggcgcgccgctgaatattaccggattaacggattatgcccaggagccgtattactcgacggcggttgggctgctgcactacgggaaggaatctcatctcagtggtgaagcagaggtggaaaaacgcgtaacggtcgggtcgtggatcaaacgactcaacagttggttgcgaaaagagttttaattttttaagagaacgcagaaaattagcgttctcaggcgacaggcacaacggagagagaaattatgtttgaacctatggaactgaccaacgacgcggtgattaaagtcatcggcgtcggcggcggcggcggtaacgccgttgagcacatggtgcgcgagcgcattgagggtgttgaatttttcgcggtgaacaccgacgcgcaggctctgcgcaaaacggctgttggccagactatccagatcggtagcggtattaccaaaggtctgggcgcaggcgcaaacccggaagtcggccgtaacgcggcggatgaagaccgtgaagcgctgcgtgccgcccttgacggcgccgatatggtgtttatcgcagccggcatgggcggcggtaccggaaccggtgctgcgccagtggtggctgaagttgcaaaagatttaggtatcctgaccgttgccgtggtgactaagccgttcaattttgaaggcaagaagcgcatggcgttcgctgagcagggcatcaccgagctgtccaagcatgtggattcgctgatcaccatcccgaacgacaagctgctgaaggttctcggccgcggcatttctctgctcgacgctttcggtgcggccaacgacgtgctgaaaggcgcggtgcagggtatcgctgagctgatcacccgcccaggcctgatgaacgtcgactttgcggacgtgcgtaccgtgatgtctgaaatgggctacgccatgatgggctccggcgtggcgagcggtgaagaccgtgcggaagaagcggctgaaatggcgatctcttctccgctgctggaagatatcgatctgtccggcgcgcgtggcgttctggtcaacatcactgcgggcttcgacctgcgtctggatgagttcgagaccgtaggtaacactatccgcgcatttgcttcggataacgccaccgtggttatcggtacctctctggacccggatatgaacgacgagctgcgcgtaaccgtcgttgctaccggtatcggtatggacaaacgtccggaaatcaccctggtcaccaacaaacaggtgcagcagccggtgatggatcgttaccagcagcacggtatgtctccactgacgcaagagcagaaaccggccgcaaaagtggtcaacgacaatacgccgcaggccgcgaaagagccagattatctggatattccagccttcctgcgtaagcaagccgattaagaattggctggaagttgggcatctgcgctctttgtgctaaactggcctgccgaatgtatagtacacttcggttggataggtaacttggcgagattatacgatgatcaaacaaaggactcttaaacgtatcgttcaggcgactggcgtcggtttgcataccggcaagaaagtcaccctgacgttacgccctgcgccggcaaataccggggtcatctatcgtcgcaccgacttgaatccaccggttgattttccggctgatgccaaatctgtgcgtgataccatgctctgtacttgcctggtcaatgagcatgacgtgcggatatcgacggttgagcacctcaatgccgcgctggctggcttgggtatcgacaacattattattgaagtcgatgcgccggaagtcccaattatggacggtagtgcggctccgttcgtttatctgttgctggatgccggcatcgatgaactgaactgcgctaagaaatttgtgcgtatcaaagagacagttcgcgttgaagatggcgataaatgggccgaattcaaaccgtataatggtttttcactggacttcaccattgattttaaccatccggcgattgactccagcagccagcgctatgcaatgaacttctcggctgatgcgtttatgcgccagattagccgcgcgcgtaccttcggttttatgcgtgatatcgaatatctgcagtcccgcggcctgtgcctgggcggcagcttcgattgtgccatcgttgttgacgattatcgcgtactgaacgaagacggtttgcgctttgaagatgagtttgtccgtcacaaaatgctggatgccattggcgacctctttatgtgtggtcacaacattatcggcgcatttacggcgtacaaatccggtcacgcgttgaataacaaactgctgcaggctgttctggcaaaacaggaagcctgggagtatgtgaccttcgaggacgacgcagaaatgccgctggcgttccgcgccccgacgctggttctggcataagtcagacccggcagtaaattcgactggtaacctggtactctctccggccagggagccagtcgttttcttttttatattcccgctgcgtcctgctttgatttttaactgcattttttgcgcgttcgttccttttttaaacgtttttcccccgcctgagacctcattcctgctgccgtgacggcgtattaatgttagtatttggacgcaaaatatttcttagggttgctaccaacaaaaggtaacgtaagtgagtggattgctgacgcgctggcgacagtttggcagacggtatttctggccgcatctcctgttggggatggtcgcggctagcctcggcctgcctgcgcttagcaatggtcatgagcatgaggccgcgtcgcccgctaaaacgacgtccagcaaccataatcctgctaaagttaatttttctcagctagcgctgctggaatcttccagtcgtcggcccaatttcacggttgattactggcatcagcacgccattcgtacggtcattcgccacctctcttttgcgatggccccgcaggcgctgccggtagcggaagagtcttcaccgcttcaggcgcagcatctggcccttctcgacacgcttagcgcgctgttgacgcaggagagtaaacctccggccattgttcatctggcggcatataacccctctatttcccactgcgcgtttcgcgtctgtacctggattagccaggtggccggcatacgcgcagggcctcaacgtctcagctaaaccaaaaacggaccattctatttttttgtgactccgcaccgcggggcgtttgagattttattatgctaatcaaattattaactaaagtattcggtagccgtaacgaccgtacgctgcgtcgtatgcgcaaggccgtcaacgtgatcaacgccatggaaccgtccatggaaaaactgtccgacgacgaactgaaagggaaaaccgctgagttccgcgctcgcctggaaaaaggcgaagccctggagagcctgatcccggaagcctttgccgtcgtgcgtgaagccagtaaacgcgtcttcggcatgcgtcactttgacgttcagctgctgggcggcatggttctcaacgaccgctgtattgcagaaatgcgtaccggtgaaggtaaaacgctgaccgcaactctgcctgcctatctgaatgcgctgaccggtaaaggcgttcacgtggtgaccgtcaacgactatctggcgcagcgtgatgccgagaacaaccgcccgctgtttgaattcctggggatgaccgttggcattaatatgtccggcctgcctgcgcctgccaagcgtgaagcctacgcagccgatattacttacggtaccaacaacgaatacggctttgactatctgcgcgacaatatggccttcagtcctgaagagcgcgtccagcgcaaactgcactatgcgctggtggatgaagtcgactccattctgatcgatgaagcgcgtaccccgcttattatttccggcccggctgaagacagctcggaaatgtacaagaaggtgaacaagatcattccgcacctggtgcgtcaggataaagaagactccgaaacctttaccggcgaagggcacttctccgtcgatgagaaagcgcgtcaggtaaacctgaccgaacgcggcctggtgctgattgaagagctgctggtgaatgaaggtattatggaagaaggcgagtcgctgtactcaccgaccaatatcatgctgatgcaccacgtgaccgccgcgctgcgcgcgcatgtgctgttcacccgcgatgttgattacatcgtgaaagatggcgaagtgatcatcgtcgacgaacacaccggccgtacgatgcaggggcgccgctggtccgatggcctgcaccaggccgttgaagcgaaagaaggcgttgatattcagaacgagaaccagacgctggcttcaattaccttccagaactatttccgcctgtacgagaagctggcagggatgaccggtaccgccgataccgaagcgtttgaatttagctcaatctataagctggataccgttgtggttccgaccaaccgtccgatgattcgtaaagacatggcggacctggtctatatgaccgaagcggaaaaaattcaggccattatcgaagatattaagcagcgtaccgccgcgggtcagccggtgctggtgggtaccatttctatcgaaaaatcagaagtggtctctaatgaattaacgaaggcgggcatcaagcacaacgtgctgaacgcgaaattccacgccagcgaagcggacatcgttgcgcaggcgggctatccgtctgcggtaaccattgcgaccaacatggccggccgtggtaccgacattatgcttggcggtagctggcaggccgaggtcgcccagctggaagacccgactccggaacagattgcgcagatcaaagccgactggcaggttcgtcacgatgcggtactggctgcgggcggtctgcatatcatcggtaccgaacgccatgaatcccgccgtattgataaccagctccgcggtcgttcaggccgtcagggggacgccggttcttcccgtttctatctgtcgatggaagatgccctgatgcgtatcttcgcgtctgaccgcgtgtccggcatgatgcgtaaactgggtatgaagccgggtgaggctatcgagcatccgtgggtgaccaaagcgattgccaacgcgcagcgtaaagtcgagagccgcaacttcgatattcgtaagcagctgctggaatatgacgatgtggctaacgatcagcgtcgcgctatttacacccagcgtaatgagctgctcgatgtgaccgacgtgagcgagacgattaacagcattcgtgaagacgtatttaaagcgaccatcgatgcccatattcctccgcagtcgctggaagagatgtgggatattgaaggcctgcaggagcgtctgaaaaatgacttcgacctcgagctgccgctcaaagagtggctggataaagagccggagcttcatgaagaaacgctgcgtgagcgcattctgcagagcgccattgaaacctatcagcgtaaggaagaagtggttggcgctgagatgatgcgtcacttcgaaaaaggcgtcatgctgcaaacgctggactccctgtggaaagagcacctggcggcgatggactacctgcgtcaggggatccacctgcgcggctatgcgcagaaagatccgaagcaggaatataagcgtgaatctttctccatgttcgcttcaatgctggaatccctgaaatatgaagtgatcagtactctgagcaaagttcaggtgcggatgccggaagaggttgaagcgatggagcagcagcgtcgtgaagaagctgagcgtctggcgcagatgcagcagctgagccatcaggacgatgatagcgcagccgcggccgcgctggctgaacaaaccggcgagcgtaaagtgggtcgtaacgatccttgcccgtgcggttctggcaaaaaatacaagcagtgccacggtcgcctgagctaagcttttacaatattgaataccagggcgcagatatctgcgccttttttatggaatgaagacaatgaaaacgctgcaaatttcagtgggtattatccgtaattcgcaaggggagatttttatcactcagcgggccgccgatgcgcatatggcgaacaagcttgaattcccgggcggtaaaattgaagagggcgagtcgtccgaacaggccttagtgcgcgaactgcaggaagaggtcggcattacagctaaagcttacagcctgtttgataagctggagtaccagtttcccgatcgccatatcacgctgtggttctggctggtgaacagctgggaaggcgagccgtgggggaaagaagggcagccgggacgctggatggcgcagagcgcgctcgttgctgaggatttcccgccggcaaacgaacccgtcattacgaagttaattcaaggttctcagatcgggtagggtgcgcctgcatccggcaaatcagggcgggcctgcacatgcccgcccgaaatccgttactctttttcttcgctccagccgtcgctatctgacagatcgctgctgctcgggatacgtttctcttccgctgcccattcgcctaaatcgataagctgacagcgtttggagcagaacgggcgatgccggctctgctcattccagaccacaattttgccgcaggttgggcagttgacggttatctcttctgacatattgactccttaacagcaggccagttcaaaatcaaaacgctccggcacgatgccgtgctcgctgtccagcggcataaagcggatggcaaagcggctcttgtggcctgatatttgggggtagagctggctggcaagatccaaccgcagacgcagcagatcggcatcttcgccgttgtcctgataaaaaccgttcaggctggtctgcttacggaagggggccgagttacggatgagatcgagaatgagcatcagcgattgcgtcagcggttccaggctggccagccacttaccgacctgctcatcgcgatattcctgcggcatatgcagccagatgtgcagcgtcggaagatcgaagctacagcagccgcccgggatactcaggcgttggcgtaccagggcgatcaggcgatcctctcgcaggtactggccgatacgcggcgccgacattaacgtactgcctgattgcttcagctgctgacgcagttcgttgatacgatcctgatcaaccccagggacttccgcccaggattgcagcttcctctgctggcgatccagctctttcatcagatcggtacgtacttcaccgcgttcaaaaacatctaaaaggtcgccgatattgcggaaaaaatgcagcgcatccgcatggctggtaatggcgggatgtacggtcagctgctgaagcaaaaactcaatacgcagccaggtgcgcattttttcattaagcggatgttcaaatagaacaggggtagacattacggtttttcctgtgaggcggcctgcgctgccagctgttgatactttgcatgcaggcgggcgacagctgatgcgatggcatcaggtgaacccatattttcaataacatcatccgcaacggcaaggcgctgctcgcgcgttgcctgagcggcaagaatatgttccgcatgttgccgactgacccgatcgcgaagcatcgtgcgcgctatctgcgtctctttcggcacatcgacaacaaggacccgatcggctttggcggacaaacggttttcgaccagtaaaggtacaacccagagaatataagacgaggtggcaagctgcatctgacgacgcgtttcctgctgaatttgcgggtgcagcagcgcgtttagccagttcttatcctctgcatgagcgaaaatatgttcacgcagagcgcgacggttaagggtgccatctttgttcaggatctgcggaccgaagcgttgagcaattgcgtttagccccggggtgccgggctcgaccacctggcgcgcgataatgtcagcatcaataacgttaaccccgaggtgtgagaatgcgtcggctacggtacttttaccgctaccgatgccgcctgttaacgctaccgtgtatgtcatacacctcaatcctgaaactgactacatgcacatttttcaataacagagccgtgatttacgacgcgacgacgccactgcgatagtggctttatcgacgtgatatcaaccaataaatggctgtcaccacgtaccctggttctttttgcgcatgtaaatcaaatggttaaaaatgatacgcctgcgatgggatatcgcaaattcgcttttggctgttcaccaggtaaatttatacgattgtagcgtaaaaaaagtgaaaatcgcagtcttgcgcggccatgattcgtgcgtatgataacgtcactggagttgtgctctcacaataatgcaattaaccccaggaattcgcacatgcgtattgaagaagatttgaagcttggttttaaagacgttcttatccgcccgaaacgttctaccctcaaaagccgttctgacgtacagctggaacgtgaattcactttcaaacattctggccagacctggtctggtgtgccgatcattgctgctaacatggacaccgttggcacgtttgccatggctaaagccctggcttcatttggcgttttgaccgccgtacataagcattacagcgttgaacagtggcaggcgtttgttcagagcgtatcggcagatgtcgtgcagcacgtcatggtctctaccggcacctccgatgcggattttgagaaaacaaaacagattctgatccaaaatccgcagcttagctttgtgtgcattgacgtggcgaatggctattcagagcacttcgtgcagtttgtcgcgaaagcccgcgaagcctggccgcagaaaaccattattgcgggcaacgttgtgaccggcgaaatgtgcgaagagctgattctttcgggggctgatatcgttaaggtgggtatcggtccgggctccgtatgtacaactcgcgtgaaaaccggcgtcggctatccgcagctttccgcagtgattgagtgtgccgatgcggcgcacggcctgggcgggcagattatcagcgacggcggatgtactatgccgggcgatgtggctaaagccttcggcggcggcgcggatttcgtgatgcttggcggtatgctggccggtcacgaagagagcggcggtaccgtggttgaagaaaacggcgaaaaattcatgctgttctacggcatgagctcggagtcggcgatgacccgtcacgttggcggcgtagcccagtaccgtgcggctgaaggcaaaaccgttaagctgcctctgcgcggcccggttgaaaacaccgcgcgcgatattcttggcggcctgcgttccgcatgcacctacgtaggtgcttcacggctgaaagaactgactaaacgcacgacttttattcgcgtacaggaacaagagaaccgcgtgttcaacagcctgtaatgccgttcgctggcgcgtttgcgccagcgttatccccccattccgctaatggcgtcgcccagatgaaaaatgggtaaatacatcgccaccaccagcacgccgacaatcgttccggtcactaccaacatcatcggttccagcaaggtcgccagattatctgcctgctgatgcgtctgctcactatggtgacgagccagattttccagcatggtatccagcgaacccgaggcttcaccggtacggatcagttgtaggcaaagcggcgtgaagcctccgccgttggcgagcgcctgccagatgggatcgccgtgggtaatttgccggcaaacctgctggagcctctgccgccatagcgggcagctcagggtttcctccacgctttgcaggccttgcagaaagctgattccggcgctttgcgtcaatgcgagtacggtaaaaatctggctaagccgctggccgcatagcagtttgccaaacaccggcagcgtatggagcagcttctgacggtacagcagccagcctggccgctggcaaatcagccggttgagtattgcaggtaaaatacccagggcagcgagcagtggccaacagcgagttaacccttcgccaatgcttattaccgcgcgggtcagccacggcagcggggtgttgaaggtttgatatatagcggcgaactccggtaagacaaagcacagcattcccatcaccaccagcagcgccagggataagataatcaacgggtagcgcagcgcttttttcactttttcggtgaggagcagctgctctcgctgctgcctggccaactgagcgcagcaaagttccagtttaccggtaagttcaccggtgcgaatcatggccagatagagcggagggaacgcctcaggccatttttccagggagcctgaaagcgaaatgccctgcgccagatcctccgccagggtttgcagcagcgcctgccattgcgcattgggctgctgctgcgccagcagttccagcccctcggccagggggagaccggcctgaagaagcgcggccagctggcggatgatttcgccactgtagcgcggatgccagagggcgctttgcacgctacagcggcgcagcgtcagcgggataattcgctgccgctgcagagcctgcaatgcctcagtgcgattatcctgccagagcgttccctggcagggaatgccctggagagagagaccgcgccagcgccacagtcgtttagtcgccatgcggtatccccaacacgcgaacgacctcttccagacttgtcatcccacgttcgacggccagacagccgctctcaaacagcgtcatcatgccggattcgcgcgccagggactcgatctctccggcgctaagaccctgagtaatcgcctgccgtaacgcggtggtgacggggagcagctcaaatagcgccaggcgaccgtagtagccgtgatagcagtgctggcagcccggagcctgccagcgaggaagcgcccgcggccacaggctgtgtggaacatcggccgaactgccggtttcccggcggcagtgcgggcacagtttccgtaccaggcgttgagcaaccaccagagaaagcgcggatgagatcatccagcgcgcaacgcccatctgctgcaggcgaaccagcgtttcactggttgaattggtgtgcagcgttgagagaaccaggtgcccggtttgcgctgcttttatcgcaatttcagcggtttctgcatcgcgtatctccccgaccatcacgatatcgggatcctggcgtagcagggcgcgcagtacgctgtgaaaggttaagcccgcccgcggattaatctgcgtctgattcatccccacgatggggatctccagcggatcttcaacgctgcatatattgacctcgtcgcgattccgcgcctgcagcgcactatacaaagtgacggttttcccacttcccgtcgggccggtgaccagcatcagcccctgaggttggttaagcgccgagcgaaaggcggcaagctgctgagacgatagccccagcgcttcgaggtccagcgcttgttcgacctggtgtaataagcgaaggacgattttttccccgccgcggcagggaagcgtggcgatccgaaacgagatcgggcggtctgcgagcgtgagggtaaactgaccgtcctgcggtacccggtgttcagcgatatccagattgctgagcactttaagtcgggcggtgatgggggcggcgagttccggcgcaagcggcgcaagagaatggagtacgccatctaccctcaggcgaattctcaggcgatcgtcaccgggttcaatatgaatatccgatgcgcgctggcgcagggcctgttccagaaggctatttacctgttcaacgatgctggccgaggcttcaacaggcggggtgagggttgatattcccggcgtctgcagccgcttgtccatctggtcctggctccagcactcgatatcaatccttttctgcgtcgcgaaacgtaacgcttccagcagctccggggcgggggcgtcaaccacggcgatagcgatggtgtgttcattgctatcgagcagtaaggcctgatagcgctggcaaagaggtatcaattgttcagttttcattgccgcgccctcagttaaaacggaacacgtcttcacaggcctgcttgagtgcgctatcgccggtaatgttgcacactcgctgccagccggtgatgccgttagcgttatcccaggtcggcgtcagcgtgacgcttaagccattaaggctttcctgcccggtgagcgtgacaacgcctgtggcgacggtcatagccgaaacgtagcgggttgtggcgggcgagggaataccgttgctgccgccatcgcaggtggttaatccgccgtgctccagcgcgcacagctcaatggcggtgcggaacgggacgaaggtttgcagcatatcggtaagcgccgcttttcgcagatagttctgataagccggaatgccgattgcgctgagaatggcgatgatcccaatgaccaccataagttcgatgagggtaaagccgcgttgtttgtccataagttgctccttgttatcttcgggagcactttgccggggtttgtttagcgatacgagcggcagatcgcgcctggagaagcacgcttccaggctttttttgcgggttgcattgagggattattagcgtgcgagccggctcgcaaaagtgcgccccggcatcaacgacgaaccggggcaggggattagcggaagcgcatagagagatcgagagcgcggacgtgcttggtcaacgcgccaacggagatgtaatcgacgccggtttcagcaaattctcgaatagtctcgaatgtgacgttgccggagacttccagcgccgcctggccgttggtgtgtttgaccgcttcgcgcatcaggtcggtagtgaagttgtcgagcataatgatgtcagcgccggctttcagcgcttcatccagctcttcaagggtttcgacttccacctcaaccggcacatccgggtgcagccagaacgctttttcaaccgcctgccgtaccgagccggaagcgataatatggttctctttaatcagaaaggcatcggagaggcccaggcgatgattggccccgccgccgcacaggaccgcatatttcagcgccgtgcgcaggcccggcagcgttttgcgcgtatcgagcagctgagttttggtgcctgccagcaggtcgacatagcggcggacttcgctggccaccccggagagcgtctgcacgaaattgagtgcggtacgttcgccggtgagcaggatccgcgaagggccttccagctcgaatagcggctgattggcttttaccgcgtcgccatcggcaacgtgccaggtgaagttaacgtcgtcgcccgcaagctgaataaagacttcttctacccagcgtttaccgcaaaacacgccatcttcacgggtgatgacgacggcatgcgagcgcgcatcctgcggcaataattgcgcgctaatatcgttgttggcatccacttcaccgcctaaatcttcccgcagggattgagcgacggcatcggtaatatcaagattaatacgctccagcaacgcgtcacggcggcggtcgggattgtagcgacgaggcgtcatgataaagctccagatagataagattcagaagtgggaaacatgctaacctgaacaacgtttctgtaccacatccgcgtcctttcgccggcggcgccagcgtgaagttatagcgttagccaaccgagcaagcgtgggtatgatgccggggattgtttggtcacggtgccgcgaatgcataagctagtaaaaggagactcaacatgcagttgaacgggggatggctggaagaggcgcgtcgggttccttcgccgcaccacgatagccgcccggataatgaaaccccctctttgctggtggtgcataatataagcctgccgcccggcgaatttggcgggccatggattgatgccctgttcaccggtacgctcgatccgaatgcgcaccctttttttgctgaaatcgcgcatcttcgcgtttcggcacactgtctgattcgccgcgacggtgaaatcgtgcagtatgtgcctttcgaccagcgcgcctggcacgcgggggtttccagctatcacgggcgcgagcgctgtaatgatttttcgataggcattgagctggaagggaccgacgagctggcttataccgacgcgcagtatcagcagctggttgccgttacccgtcagcttatctcgcgctatccggcgatagctgacaatatcaccggccatagcgatattgcgccagtgcgtaaaacggatcccggcccggcttttgactgggtcaaatttcgcggtctgttaaccccgtcgtcagaataaggagatgccatgacgttgttcactacgctgttagtcctcattgccgagcgtttgtttaagctgggcgagcactggcagctcgatcaccggctggaagtgctgtttcgccgggtaaagcattattccctgctcaccaccctactgatgacggtcgcggcggcggcggtcgtgtttattattcagcgcctgctgcaggggcagctgtttaacattcctctgctggtgttctggatcctgctgggcctgctgtgcatcggcgcgggcaaagtccgtctgcactatcacgcctacctgaaggcggcggcgcgcgatgatagccgcgcctgcgacgccatggccagcgagctcaccctgatccacggcgtgccgcccggctgcgaccagcgtgaatatctgagcgagctgcaaaacgcgctgctgtggattaactaccgctactatctcgctccgctgttctggttcgttgtcggcgggccgtggggaccgttaaccctgattgcctactgtacgctgcgggcctggcagacctggctggcgcgttatcagacgccgcgtcatcgcttacagtcgggtattgacggcattctgcacgtggtcgactgggttccggtacgtctggtcggcgtggtgtacgcgctggttgggcacggggaaaaggctttgcctgcgtggtttgcctcgctgggcgacctccactcttcgcagtatcaggtgctgacgcgcctggcgcagtattcgctggcgcgcgagccgcatgtggataaagtggcgacgccgaaggcggcggtctccatggcgaaaaaaacatcgctggtggtggtggtgattatggcgctgctgacgatttacggtacgctgatttaagcacctgcccgctgggggcaggttccgcttttaatccgtatctgctgccgggatgccaaaatcaggcatcccgttttcgtcccagcggacaagcttcaggcgggtatggcgattcggatcgtacagcgggtcgccttcgatttcggtgtagttgcgcgcgtggtacaccagcacatcttctccctccggcgtttgcgtaaagctattgtgtccgggcccatactgacgattctcatagctggtacggaacaccggctgcggcgctttatgccagttttccggccgcagcgggtcggcgttaatgtctatccacaataagcccatacagtagttttcgtcggtggcgctggcggagtagctgacgaacagcttgtcgccgtggaacaggaccgccgggccttcgttcaccagaaaaccccggcactcccagtcaaactcgggttgactcagcatgaccggctgaccttttagcgtccacggatttgccagttcagccagatagaggttggtattacccttaatttccggatctttttgcgcccacaggtaccaccgtttaccctgatggtggaaggtggtggcatccagcgcaaaggtatcaagcggcgttttaatctggcctttttcctgccatttcccggttaacgggtcgctctccgcgcattcgagcgcgaacatgcggtgctggaacatgcccagcgcatccagatcgtgggtgtggctggcggcaaagtagatataccatttgccgtcaatctcatgcagctccggggcccatatgagctggctcatcgggccgctgtccggtttacgccagacgaccaccggctgcgcgtcgcgtaaaccttcaagggttgctgagcggcggatttccagacggtcatactccggcaccgaggcaataaagtagtagctctcctgatggcgcagaatatacgggtccgcgcgttgttcaataaatggattcggccagtttttcattacgctttccttacctgttcgccggttttcagttcctgatagtcgttgagttcgctgtagttgacccggcgtttctcgaggtcggactgaattagccgcataaattcgcggtttaccttcagcatacgcaccacccccgcggtaatcagatagccgatgccggggataacgctgaataacaatacgataccgttaatcgcggaggcgctttgctgcttcgcaccggcatcgtaaccgtaccaggagagcaggaagccaaccatcgcgccggcgatggccagaccgaccttcaggaagaacaggttgccggagaagctgatgccggtgatgcgtttgccggtcttccattcgccgtagtcatccacgtcggccatcagcgaccagtgcagcggcgaggggatctgatgcagaatgttcagcaggaagtagagcaccataatcatcatggtggcgtgcgggtcgaagaagtagaaggcgcaggagaaaatcgccagcacgatgttggtccagaaaaacacctgcagtttgcaccagcggtcggtcaggactttagccagcatactgccgatcatcattccgactaccccgaggctgataaatagcgtggcgaagtgggtgctttgctgcatcacccaggtgacgtagtacatggtggcggccatgcgaataaagcccggacaaacgttgcacagcgttagcagcaggatgcgaacccactggtcgtttttccagacgtctttcagatcttttttcagctcgtcgttggtctggacggcgggttttacgcgttcacgaacggtggcaaagcagaacaggaacatgcacataccgataatcgccagcacggtcatcgccatctgatagcctttggctttatcctcaccgccgaaccagtccgccatcggcagcagcgtcagggagagcaggagcgtggcgataccgaccatcacgaagcgataggactggcaggccacgcgttccttcgggtcattcgtaatcacgctacccaaggagcagtaggggatgttgatcgcggtgtaggtcagcgagagcaggaagtaggtgacgaaagcatagataaccttgctattgtacgaccactccggggtggtaaacatcagcacgctgaacagcgcgtacgggaaggcaatccacagcagccatgggcgaaagcgcccgtatttactgcgggtacggtcggccatcgcccccataatcggatcggtgacggcatcaataacgcgtacggaaagcagcaaaacgcccaccagcgccggcgcgagaccaaaaatatccgtataaaaatagttaacaaacaacatgatggcgccgaatatgatattgcatccggcgtcacccatcccgtagcctattttttctttaactgaaagcttattgccattcatcgcagcgatctccccgtggcggtatggagagaattattagccgggtaatggactaatgcgttgcaggatagggttaacgatatggataaatcggttatcagggggaaagtgtgaagcagataacaatgcgctgtgtccgccagcggcgggcggacacaggttgtggagatgcaggattatgctttaatggcgctggcggttttctgcttaaacaggtagccgacgccgagaacggcaatccataccgggataaggtagacggaaatcgccatgccaggggtcatcagcatgatcaccagcactcccgccataaacagcaggcagatccagttgcccagcggataaagcagcgccgggaagcgggtgaccacgccctgctgctgcttagcgcgacggaacttcatgtgcgccaggctaatcatcgcccagttgatcaccagggctgaaaccaccagcgccatcagcagaccaaacgcggattccggcgcgaagtagttaatcagtacgcacagcgcggtgaccaccgcggagacgaggatggtgttgaccggcacgccgcgtttatcgacgctcatcagcgcttttggcgcgttcccctgctgggccagaccgaacagcatccggctgttgcagtatacgcagctgttgtaaacggagagcgccgcggttaataccacgatattcagcgcattcgcgacgaaggtatcgcccagctcgtggaaaatcaggacgaacgggctggtatcggcggttacgcggctccacggcagcagcgaaagcagaacggccagcgagcccacatagaaaatcaggatgcggtagatgacctggttggtggccttcggaatgctctgctccgggttatccgcttcggctgcggtgataccgaccagctccagcccgccgaaagagaacataataatcgccatcatcattaccagcccggtgaagccgtgcggcaggaatccgccttgctcccacaggttgcgtacggtggcctgcgggccgccgttgccgctgaacagcagccagccgccgaacaggatcatcgccacgacggcgacgactttgatgatcgcgaaccagaactccatctcgccaaacaccttgacgttcgtcaggttgatggcgttgatagcgataaagaaaacggccgcagaaacccaggtaggaatttccggccaccagaactggacgtatttcccgaccgcggtcagctcggccattgcgaccagcacgtaaagcacccagtagttccagccggaagcgaagcctgcaaagccgccccagtatttgtaggcaaaatgactaaatgaaccggctaccggctcttcgacgaccatttcgcccagctgacgcataatcaggaaagcaataaaaccggcaattgcgtagcccagaataataccgggacccgcgttttggatgacggatgcgctacccagaaacaaaccggtaccgatagcgcctcccagcgcaataagctgaatatggcggtttttaaggccgcgctttagccgatcgccatgctgttgaccttccatcatgaatcctcgtgtgtggttatggctattatgtttgtccgcgtcatccatcaggtgacttcttcgctgtccatccctgcctgatagcatagtcagcgaatttctacggagcctgcgccccgttttgccccgagtgatgtagcgcacatattgttgtgtttgtgtaattatcaaattccgtagatgtacttatttctttacgcaaggcggagaggaaattcatgaaaaggcctttcgtatcatggagaatagtgataagcgccgctgaatgcacctgctttatgaagggatgatgacgaagcgagcaaaaagacgccatttgtaaatcccaccccatgcgccagtgcctacccactatttgtcatccatgcaaatttattgaatttatattcacttcatgaggagttgaatcggttcagatagcgtaatttttcgtttctattacgttaacgctacctctttgtgagtaaacacaacatttgtgcaaggttacatttttgaaatgttatttctgtaaggttgttaaaacgtgccgggtttaatgatttcaatcaaaacctgtatggacagaaggtgaatactttgttactttagcgatacgaactatgaattggtaagaccaattgactccgggctaatggcagagacagggaatatggcctacagcaagatccgccaaccaaaactatccgatgtgatagagcagcagctggagtttttaatccttgaggggacgttgcgccccggtgaaaaactcccgccagaacgtgaactggcaaaacagttcgacgtttcccgtccctcgctccgtgaggctattcaacgcctcgaagctaagggcttgttgcttcgtcgccaggggggcggaacgtttgtacaaagccgcctgtggcagagcttcagcgacccgctggtagagctactgtccgaccaccctgaatcccaatttgatctgctggaaacccgtcacgcgcttgaaggcatcgcggcttattacgcggcgctgcgcagcaatgatgaagaccgcgaacgcattcgcgagctgcatcaggccattgagcgggctcagcagtccggcgatctcgacgccgaatccgatgccgtcgtccagtatcaaatcgccgtcaccgaagcggcgcacaatgtggtgctgctccatctactacgctgtatggagccgatgctggcccagaacgttcgccagaattttgaattgttgtacgcccgtcgggagatgctcccgcaggtcagcaatcatcgtactcgcatttttgaggcgataatcgccggggaaccggagcaggcgcgtgaagcgtcgcatcgtcacctggcgttcattgaggaaattttgctggatcgtagccgtgagcagagccgtcgtgaacgctcactgcgtcgtttacagcaacgaaaagatgagaactccggttcttaagcgccatttttagagcgcggcaactaaacgcagaacctgtcttattgcacttttagttgttcaaaataattttgggtgtatcgcggcggcaagcgcgcgaatccccgggagcatagtgaactatgtgactggggtgaggaagcgaagccaacaaagagacagccagaagtatgaagaacaaagagcgcaatgggacaggttccagattaatcaacgattagatagataaggaataccccccatgtcagaacgtttaccaaatgacgtggatccgatcgaaactcgcgactggctacaggcgatcgaatcggtcatccgtgaagaaggtgttgagcgcgctcagtatcttattgaccaactcctttctgaagcccgcaaaggcggggtgaaagtggctgctggcgcatcgaccggcggttacgtgaacactattgccgttgaagatgagccggaatacccgggtaatctggatctggaacgtcgtatccgttctgcgatccgctggaacgcgattatgaccgttctgcgcgcatcgaaaaaagatctcgaactgggcggccacatggcttccttccagtcttccgcaaccttctatgaagtgtgctttaaccacttcttccgcgcacgcaacgagcaggacggcggcgacctggtttacttccagggccacatctctccgggcgtctacgcgcgtgctttcctggaaggtcgtctgactgaagagcagatgaacaacttccgtcaggaagttcacggtaaaggtctgtcctcttatccgcacccgaaactgatgccggaattctggcagttcccgaccgtctctatgggtctgggcccaatcggtgcgatttatcaggctaagttcctgaagtatctggaacaccgcggcctgaaagacacttccaaacaaaccgtttacgctttcctcggcgacggcgagatggacgagccggaatccaaaggcgcgatcaccatcgcgacccgtgagaagctggacaacctggtcttcgttatcaactgtaacctgcagcgccttgacggcccggttaccggtaatggcaagatcattaacgaactggaaggcatctttggcggtgctggctggaacgttatcaaggttatctggggcggacgctgggatgagctgctgcgtaaagataccagcggtaaactgatccagctgatggaagagaccgttgacggtgactaccagaccttcaaatccaaagacggcgcttacgtgcgtgagcacttcttcggtaaatatccggaaaccgcagcgctggttgccgactggactgacgagcagatctgggccctgaaccgcggcggtcacgatccgaagaaagtctacgctgcgctgaaaaaagcacaggaaaccaaaggcaaagccaccgtaatcctcgcccataccattaaaggttacggcatgggtgacaccgctgaaggtaaaaacatcgctcaccaggttaagaaaatgaacatggacggcgttcgctacgtccgcgatcgtttcaacgtgccggttgccgatgctgatatcgaaaaactgccgtacgtgaccttcccggaaggttctgaagagcacacctatctgcacgcccagcgtcagaaactgcacggctatctgccgagccgtcagccaaacttcgatgagaagctggagctgccgaccctggaagatttcggtccgctgctggaagagcagaataaagagatctctaccactatcgcgttcgttcgtgccctgaacgtgatgctgaagaacaaatccatcaaagaccgcctcgtgccgatcatcgccgatgaagcgcgtacctttggtatggaaggcctgttccgtcagattggtatctacagcccgaacggtcagcagtacactccgcaggaccgtgagcaggttgcttactacaaagaagacgagaaaggccagattctgcaggaaggtatcaacgaactgggtgccggtgcatcctggctggctgctgcgacctcctacagcaccaacaacctgccgatgatcccgttctacatctactactccatgttcgggttccagcgtatcggtgacctgtgctggcaggcaggcgaccagcaggctcgcggcttcctgatcggcgggacttccggtcgtaccacgctgaacggcgaaggtctgcagcacgaagatggccacagccacattcagtctctgaccatcccgaactgtatctcttacgatccgtcttacgcgtacgaagttgcggtcatcatgcacgatggtctggagcgtatgtacggtgagaaacaagagaacgtttactactacatcaccacgctgaacgaaaactaccacatgccggcaatgccagcaggcgccgaggaaggtatccgtaaaggtatctacaaactcgaaaccgttgaaggtagcaaaggtaaagttcagctgctgggctccggttctatcctgcgtcacgtccgtgaagcagcgcagatcctggccaaagactacggcgtaggctctgacgtttatagcgtcacctccttcaccgaactggcgcgtgatggccaggattgtgaacgctggaacatgctgcatccgctggaaacgccgcgcgttccgtacatcgctcaggtgatgaacgacgctccggcagtcgcatctactgactatatgaaactgttcgctgagcaggttcgtacttacgtaccggccgatgattaccgcgtactgggtaccgacggcttcggtcgctctgacagccgtgaaaacctgcgtcatcacttcgaagttgacgcttcctacgtggtggtagcagcgctgggcgaactggctaaacgtggcgaaatcgataagaaagtggttgcggaagccatcactaaattcaacatcgatgcagataaagttaacccgcgtctggcgtaagaggtaaaagaataatggctatcgaaatcaaagtaccggacatcggggctgatgaagttgaaatcaccgagattctggtcaaagtgggcgacaaagttgaagctgaacagtcgctgatcaccgtagaaggcgacaaagcctctatggaagtcccgtctccgcaggctggcgtcgttaaagagatcaaagtctccgtcggcgacaaaaccgagaccggtaaactgatcatgattttcgattccgccgatggtgcagcagccgctgcacctgcgcaggaagagaagaaagaagccgctccggccgccgcagcaccggcagccgccagcgcgaaagaagttcatgtaccggatatcggcggtgatgaagttgaagtcacggaaatcatggtaaaagtgggcgacaccatcgccgctgaacaatccctgatcaccgtagaaggcgataaagcctctatggaagtgccggcgccgttcgccggtaccgtgaaagagatcaagattaacaccggcgacaaagtgtccacgggttccctgatcatgatcttcgaagtggcgggcgcagcgcctgccgcggcgccggcgaaagcggaagccgctccggctgctgctgcaccggcagcttcaggttctaaagaagttcacgtgccggatatcggcggcgatgaagttgaagtgactgaagtgatggtgaaagtgggcgataaaattgccgctgaacagtcactgatcaccgttgaaggcgacaaagcttccatggaagtgcctgcgccgttcgcgggtaccgtgaaagagatcaaaatcagcaccggcgacaaagtctccaccggctccctgattatggtcttcgaagtggaaggcgccgcgcctgccgcagctccggctgccgcggctgccccagcaccagctgctgcaccggctcaggctgctaaaccagctgcacctgctgcaaaagcagaaggcaaatctgagttcgctgaaaacgacgcttacgttcacgctaccccgctgattcgtcgcctggcgcgcgagttcggcgtaaacctggcgaaagtgaaaggaactggtcgtaaaggccgtatcctgcgcgaagacgttcaggcctacgtgaaagaagcggttaaacgcgctgaagccgcgcctgctgctaccggtggtggtatcccgggcatgctgccgtggccgaaagtggacttcagcaagtttggtgaagtggaagaagttgaactgggccgcatccagaagatctctggtgctaacctgagccgtaactgggtgatgatcccgcacgttacgcacttcgacaaaaccgatatcaccgatctggaagcgttccgtaaacagcagaatgccgaagctgagaagcgtaagctggacgtgaaattcactccggtggtcttcatcatgaaagccgttgccgcggcgcttgagcagatgccgcgcttcaacagctccctgtctgaagatgcacagcgtctgacgctgaagaaatacatcaatatcggtgtggcggttgataccccgaatggtctggttgttccggtcttcaaagacgtgaacaagaagagcattaccgagctgtctcgtgaactgaccgtgatttccaagaaagcgcgtgatggtaagctgaccgctggcgaaatgcagggtggttgcttcactatctccagcatcggcggcctgggtaccacccacttcgcaccgattgtgaacgcgccggaagtggctatcctcggcgtctccaagtccgcgatggagccggtatggaatggcaaagagttcgtgccgcgtctgatgatgccgatctctctgtccttcgaccaccgcgtgatcgacggtgctgatggtgcgcgctttatcaccatcatcaacaatatgctgagcgacattcgccgcctggtgatgtaagcaaaaagccggcctgacggccggcttttttctggtaatctcttctgcgttttgaagttaccagcaataaaggacaaaatcgtttgccgtttgttgtttcaaaattgttaacaattttgtaaaatgcttgcggatagaacgtcccggtggacatgggcgtaaaaacaatagcgtcagacccgccggatacaaataacagaggtcatgatgagtactgaaatcaaaactcaggtcgtggtacttggggcaggccccgcaggttattctgctgccttccgttgcgctgatttaggtctggaaaccgtcatcgtagaacgttacagcaccctcggcggtgtttgcctgaacgtcggctgtatcccttctaaagcactgctgcacgttgctaaagttatcgaagaagcgaaagcgctggccgaacacggcatcgttttcggtgaaccgaaaactgacattgacaagattcgcacctggaaagaaaaagtcatcactcagctgaccggcggtctggctggcatggccaaagggcgtaaagtgaaggtggttaacggtctgggtaaatttaccggcgctaacaccctggaagtggaaggcgaaaacggtaaaaccgtcatcaacttcgacaacgctatcatcgcggcgggttcccgtccgatcgaactgccgttcattccgcatgaagatccgcgcgtatgggactccaccgatgcgctggagctgaaaaccgtaccaaaacgcctgctggttatgggcggcggtatcatcggtctggaaatgggtaccgtataccatgcgctgggttcagagattgacgtggttgaaatgttcgaccaggttatcccggctgccgataaagacgtggtgaaagtctttaccaagcgcatcagtaagaaattcaacctgatgctggaaaccaaagtgaccgccgttgaagcgaaagaagacggtatctacgtttccatggaaggcaaaaaagccccggctgaagcgcagcgctacgacgccgtgctggtagctatcggccgcgtgccgaatggtaaaaacctcgatgccggtaaagcaggcgttgaagttgacgagcgtggctttatccgcgttgataaacagctgcgtaccaacgtgccgcacatcttcgctatcggcgatatcgtcggtcagccgatgctggcgcacaaaggcgttcacgaaggccacgttgctgccgaagttatcgccggcatgaagcactacttcgacccgaaagttatcccgtccatcgcctataccgagccggaagttgcgtgggttggtctgactgagaaagaagcgaaagagaaaggcatcagctacgaaaccgccaccttcccgtgggctgcttctggccgcgccatcgcttccgactgcgctgacggtatgaccaaactgattttcgacaaagaatctcaccgcgttatcggcggggcgattgtcggcaccaacggcggcgagctgctgggtgaaatcggtctggcgatcgaaatgggctgtgacgctgaagacatcgcgctgaccatccacgctcacccgactctgcacgagtccgttggcctggcagcagaagtcttcgaaggcagcatcaccgacctgccaaacgcgaaagcgaagaaaaagtaaatttttctttcaggcaaaatccaaaaagcggctcagtgagccgctttttttatcggtgatgtttagaactgtgtcgccgttaataaaattgcatatcttattaatactttaaaaatagttactcagtaaacttataggtagttaactatatgtgaggtgtgtgatgaaaaaagttttaacgacgacgctgctggcagcaacgctggtctcgggtatggcctgcgcggccgatgccgcgattccctgggctgataacagcggcgggaccgaaagcacccatattgcggcgatgggccaggatttgaatatgcagcatcagcagataacaaagaccagcgaaggggtatgggcggcgaattccggcagcatcagctctgatgaagcggcgttgaccagcactaaaccggcttttgcgggtgacccgtctctgatgccccatcagggctaaatcagcacacagatatggcccggcggcgttatcgcacgccgggcttttttctattgattgatggcctgccaggctgaatccggcgaaaactgcgaaattgcgcgcgctttgctctgcgtctcatcccctaaattagcctgataaacctcatcattctggttgaccataaagctcatgatgccggtttttccccattccacaggccacgccagcagggcgaagccctgaccctcgccatcttgaatgatgcgaaaacggtagccgtgatagccttctccgggttcggcggggctaaacgcgggcccaagcgggctgggcgcttcgccgggagcggcaggccagtagaggccgtctttcttgccatcgctgctgataatcctctgcgcccaggtgtggtttagccgataaaaatcctgctgggcatcaacgtaagcgtgcatcgcctgaatggctgacagctcattgcggccaatcgcgcgagtcaggatctcatcttcagcagcggccatatcaaaacgccagccgctcttatccttaatgatggggatcggtagccgccatgcttcctgtcccacctccagccaggcgctattctgctgctgaacgatacgatggctgactttccagtcgcgctgaaagcgagcgacggcatcagggtcgatgccctccggcggtaaaaattgctgccagctatcgccgagcagcccgttgagggcagattcatcatgcctgccgattgcctcagccagcgcgcttgcggcctgttccggagaggaaaactgctgctgagccagcgccatggcgggcgtcagggccagcgccagcagcgtcatttttaataattttttcatctgattatcctcagcggcggcgcagttcacggtgttcggaaagatgttctctggccgcgctgcgctgctcgctgcttaaacccgagatatggcggctctgcaggccgcgctcctgctgagactgccaggagggagagcggatatcgttaccgctcagggcattggcgtgcagattattcagcttctgctgacgttgttcgggcgttgcggcccggaactgttcacggcgctgttgctgctgcgccgtcggatgctgaatttgcgttttgaccgcttcccgatgctgctgttgtacggcgctattttttaccgccggcgtggcgtcatagccgcgatagttattgcgctgggtcacctgatggagctgctgcgacgcggcctggcgctgggcatcgcgggaaggcgcgtgattaagcgcgttatccgcaggcccggtacgctgctgtagttgcgtcatggccgcctgacgctgcgcgttgcgatcggcgggctgatgttgggtcgcgctaaggccgccgggaacattggtctgatggtaatgctgcgcaatcgtattgttcggatagggaatattgccgcggtaggccggattatgctgccagctggcgtggtttcccggcaggttctgcccggtaatatggttgaaattattgacgttgatgttgatgttatcgccgttgtgcgcgtagccgccgtgatgatcatcatcgtgatggtgatcgtcatcgtcatggtggtgatgatcgtcatcatcccagtcgatgctgctgaacagagcgtaggttgtggcgacgccgaggctatagccaaaccccttgacgaagctgtcggtaaactgctcccccggaggcggcggcaggtagaccggcggataggcggtgtcaggccaggcgccgtaaacaactgaagggttataggccggcacgtacaccacatttggattggtggattcgattttaatcacctgcgccggggcggaggatgtcacggcgctgctgctgctgcgggaagcggtggccgtggacgttgccgaagccggtgccgcggagcgggtggcggtgatgactttctgctgcggcgtggattttaacgttccggtctgctgggcgatggcgcgtaagcgctgcaccgaatccatgacggcctgcggctgggcgagaaaggcgttacccaggttttccacccacggcgcattttctcccattaacgcgagaagggaagggaaggcgaccagcgattttacgctgggatcccagggctgatttgccaccgcttgcaccgccgcgtcgcccttcattgtggggttatcctgcgaccactctaccgcctggacaacgttactcgggtaggtcgaagccatcagcacctgcgacagcagattgtccggatagagcgcgattggcgcgacccactggtctatctgcgcgggtgtataggtcgtggtcaccggctgggcggcggcggttgcctgcgccgtctgcgcaacggcggggggctcgggaaccgtttgcggctcccggcttttgacgtagagcgtacccgcggcggctaatagcccggcgctacagagcagcgcgagcagatggggtttgaaaggcagtgtcatgagaactcccggcacaataattggcccgttttgacagagtattgtcgaaaagcgggggattgcctgagtatagagagcgcgtatttgcgtttttgattttagttgggatttcgctcaattatgtgtaacagaattaattttatataccgctaaattgacagaaaacctgcattattctgcccttaacgattcagctaatttttaatgttgcttttttgtaaacagattaacaccccgccaaaatcctgctatgctgccgacgcggtatcgggcatttaccctacaaactgctgtctcacaggagcgtgaagagaatcgcctaccgcattttacaatgagagcgaggagaaccgtcgtgctagaagaataccgtaagcacgtagctgagcgtgccgccgaggggattgtaccgaaacccttagatgcaacccaaatggccgcgctggtagaactgctgaaaaacccgccagcgggtgaagaagaattcttgttagacctgttaattaaccgcgtaccgccgggcgtcgacgaagccgcctatgttaaagccggattccttgccgcgatcgccaaaggcgaagcgacttctccactggttacccgtgaaaaagctgtcgaactgctgggcaccatgcagggcggttacaacatccatcccctgattgacgcgctggacgacgcaaaactggcgccgatcgccgcgaaagcgctgtcccacaccctgctgatgttcgacaacttctacgatgtagaagagaaagccaaggcgggcaatgcctacgccaaacaggttatgcaatcctgggccgacgctgagtggttcctgagccgtcctcaactggctgacaaaatcaccgtgaccgtttttaaagtcaccggcgaaaccaacaccgatgacctgtctccggcccctgacgcctggtcccgcccggacattccgctgcacgcgctggcaatgctgaaaaacgcccgcgaaggcatcgacccggatcagcccggcgccgttggcccgattaaacaaattgaagcactgcagcaaaaaggtttcccgctggcgtacgtcggcgatgtcgtgggtaccggctcatcgcgtaaatccgccaccaactcggtgctgtggtttatgggcgacgatattccgcacgtgccgaacaagcgcggcggcggtctggttctcggcggcaaaattgcgcctatcttctttaataccatggaagatgccggcgcgctgccgattgaagtggacgtaaacaacctgaacatgggcgacgtgatcgacgtttatccgttcaaaggtgaagtccgtaaccacgaaaccggcgaactgctggcgaccttcgagctgaaaaccgacgtgctgatcgacgaagtgcgcgccggcggccgtatcccgctaatcatcggccgtggcctgaccaccaaagcgcgtgaagcgctgggtctgccgcacagcgatgtgttccgtcaggcgaaagacgtggcggaaagcagccgcggatactctctggcgcagaagatggtggggcgcgcctgcggcgtggccggggttcgtccgggcgcttactgcgaaccgaagatgacctccgtaggctctcaggacaccaccggcccgatgacccgtgatgagctgaaagacctggcgtgcctgggcttctcttccgacctcgtgatgcagtccttctgccataccgccgcctatccgaagccggtggacgtcaccacgcaccacacgctgccggacttcatcatgaaccgcggcggcgtatcgctgcgtccgggcgatggcgttatccactcctggctgaaccgtatgctgctgcctgataccgtgggtaccggtggtgattctcatacccgtttcccgatcggtatctccttcccggcaggctcaggcctggtggcgtttgccgccgcaactggcgtcatgccgctggatatgccggaatcggtactggtacgttttaaaggcaaaatgcagccgggcatcaccctgcgcgatctggtacacgccatcccgctgtatgcgatcaaacagggtctgctgaccgtggagaagaaaggtaagaaaaacatcttctccggccgcattctggaaattgaaggtctgccggatctgaaagttgagcaggcgtttgagctgaccgatgcctccgccgagcgttccgctgcgggctgtaccattaagctgaacaaagagccgatcgttgagtatctgacctccaacatcgtcctgctgaagtggatgatcgccgaaggttacggcgatcgccgtacgctggagcgtcgcgttcagggcatggaaaaatggctggcggatccgcagctgctggaaggcgacgcggatgcggaatatgcggcggtgatcgatatcgatctggccgatatcaaagagcccatcctctgcgcgccgaacgatccggacgatgcgcgtttgctgtccgacgtgcagggcgagaagatcgatgaagtgtttatcggttcctgcatgaccaacatcggccacttccgcgcggccggtaagctgctggacaaccacaaaggccagctgccgactcgtctgtgggtggcgccgccaacccgtatggacgccgcgcagctgactgaagagggctactacagcgtgtttggtaagagcggtgcgcgtattgaaatccctggctgttccctgtgcatgggtaaccaggcgcgggttgccgacggtgcgacggtggtctctacctcaacccgtaacttcccgaaccgtttaggtaccggcgctaacgtcttcctggcctctgcggagctggcggccgtggccgcgcttatcggtaaactgccgacgccggaagagtatcagacctatgttgctcaggtggataaaaccgcagcggatacctatcgttatctgaacttcgaccagctcggtcagtacaccgagaaggccgatggggttattttccagaccgcggtgtaatgcgctaactcagcgctgtacataatcccgccaatgcccggtgaactttgcgtcaccgggcatttttatttcccgtccctccgtccaccacgctttttttctcttccactgctgcgataatgactgtatgggtacagtgcagcggtgacgcactgcccttgcagaggaaaagactatggattacgaatttctgcgcgatattaccggagtggtaaaggtgcgaatgtcgatggatcatgaggcgatcggccactggttcaacgaagaggttaaagataaccttgccctgctggacgaagtcgagcaggccgcgcgcaccgttaaaggcagtgaacggtcctggcaacgcgtcggccatgaatacacgctatggctggacggcgaagaagtgatgatccgcgctaaccaactggatttttccggcgatgagatagaagaggggatgagctactatgacgaagaaagcctctcgctatgcggcgtggaagactttcttcaggtcgtcaacgcctatcgaaaatttgtaggtcaatcctgagcaacgttaatcatttccacggccggacagttatgtccggcttttttttagccttaacggcctggtttgatttttattaatcattttaaaactgtgatctggcgcgtttgtgaagtttatttgattgaatataatctttatgattttatttaatcacagcataacaacaggcgggaagaccatgaacatcaaaaaggctatagaacgtgtacctggcggcatgatggttgtgccactggtgatcggcgccattatcaatacctttgccccgcaagcgcttgagatcggcgggttcaccaccgcgctgtttaaaaacggcgcagcgccgctgattggcgccttcctgctctgtatgggggcgggaattagcgtcaaggcagcgccacaggcgctgttgcagggcggtacgattacgctgaccaaactcctggtcgccattgcgattggcctcggcgtggaacaactctttggtgctgaagggatcttcggcttaagcggcgtggcgatcatcgctgcgatgagtaactcgaatggcgggctttacgccgcgctggttggcgagtttggtaacgagcgtgatgtgggagcgatctccatcctgtcactgaatgacgggccattctttacgatgatcgcactgggcgcggcggggatggccaacattcccattatggcgctggtcgccgtgctggtgccgctggtggtgggaatgatcctgggtaacctcgatcccaacatgcgcgacttcctgaccaaaggcggcccgctgttgatcccattcttcgcttttgcgctgggcgcagggatcaaccttgaaatgctgctacagggcggtctggcgggcattctgctcggcgtgctgacgaccttcatcggcggtttctttaacattcgtgccgaccgtctggtgggcggaaccgggattgccggcgcggcggcgtccagtaccgccggaaacgccgtggcgacgccgctggcgattgcccaggccgatccctctctggcagaggttgccgccgcggccgcgccgctgattgccgcatcggtgatcaccaccgcgattctgacgccggtcctcacctcatgggtggctaagaagcaagcgcgtcaggttgcagaggagaaaaaagcatgaaaatgatcgttatcgccgacgactttacgggttctaacgataccggcgtgcagctggcaaagaagggggcgcgcacggaagtgatgctaacgccagatcaaaaaccttcgcgtcgcgctgatgtgctggtgatcaacaccgaaagccgcgcgatgcctgcagctgaggccgggaaagcggtagcgcaggcgttagcgccgtggtgcgatggtgatgcgcgtccgctggtttacaagaaaatcgactccactttccgcggtaacgtgggggctgaagtgacggcggcaatgcgtgctgcaaaccggaagctggccgtaattgcggcggctatccccgcagccgggcgtaccacccgcgacggattatgcctggtcaacggtacgccactgctggaaaccgaattcgccagcgatccgaaaacgcccattatctcctcacgcattgcgacgttgatcgccctgcaaagcgatatcccggttcatgaagtgtcgctcgaagacgttcgtcgggggcaattgagcgccctgttgacggctttttcagccgagggtgagtgcatggtggtggtggatgccgtggaagatcgcgatctgttgctgattgcccaggctatttgtgaacaaaaagagatgccgctgttggtgggcgctgccgggctggcgaacgcgctaccggtcagcaccttcatgcaggaaaagcaggagctaccggtactggtggtggccggatcgatgagcgaggccacgcggcggcaggttgaaaaagcgctctgccaggcgcgcgccagggtcgtggatattgatgcctcgcggctggcctcggcccagtacgagcaggaaatggccgcggcggttgaacaggcctgtgcgctgctcggtcgccagcagcacaccattttacgtaccagccggagtgcggacgatcggcagatgatcgacggcctgtgcgctcaggctggcgtaagccgccagcagctcggtgagatgcttagcgaacgcctcgggatgattacgctgcgcattatcgaacaggctcgtattggcgggctcttcctgaccggaggagatatcgccaccgcggtcgccgccgcgctcggggcggaaggctatcgcattcagagtgaggtggcgccctgtattccctgtgggacgttcgttaacagtgaaatcgacgatctgccggttatcactaaagccggcggattcggttcagacagcaccctttgtgatgcgctttattttattgaggagatgtacagtggtaactaaaacaattgcgattacgatgggcgacccggcgggcatcggtccggaaattattgtcaaagcgctttgtgaagacgagctcaacggcgcgccgctggtggtggtcgggtgtctgaaaaccctgaaacgtctgcaggacaaagggctggccgaaggcgtcacctttcgcgcgatcgccgaggtcgcggaggcgcgatttgctcctggcgtgattcatgtcattgacgagccgctggcccagccggacgcgctggagccgggtaaagtgcaggcccaggcgggcgatctggcctaccgctgcgtgaagcgggcgacggcgctggcgatgaaaggcgacgtacacgccatcgcgaccgcaccgctgaataaagaagcgcttcatctggccgggcacaattatcctggtcataccgagctgctggcgacgctgactgaaagccgcgattacgccatggtgctctacaccgacaagctgaaggtcattcatgtctcgacccacattgcgttgcgtaagttcctcgatacgcttaatggccagcgcgtggagacggtcatcggcatcgcggatcgcttcctgaaacgcgtcggcttcacccagccgcgcattgccgttgccggggtcaatcctcatgcgggcgaaaacggtctgtttggcgatgaagaaatacgcattgtgtcgccggccattgaaaacatgaaagcgaagggaatcgatgtttacgggccctgcccgccggacaccgtgtttctacaggcatacgaggggcaatatgacatggtggtggcgatgtaccacgatcagggacatattccgctcaaactgcttggcttctacgatggggtgaatatcaccgcgggtctgccgttcatccgcacctctgccgatcacggcaccgcgtttgatatagcctggacgggaaaagcaaaatctgagagcatggccgtatcgattaaactggcaatgcaactggcgtaatttcctgttatgaaaggacaacaccgtctggataagattgtagcgtatttgaaaaatcatacgctggtgaccgtggaacagctggtggatgcggtagaagcatcgcctgcaacgatacgacgcgatctgatcaaactggatgagcagggcgtgatcagccgcagccacggcggtgttgccctgcggcgctttgagccttctcagcctaccaccaatgaaaagcagctacgatcgcctgcggaaaagcgggcgattgcgcgttttgccgcctcgatggtgcaggcgggcgacgcggtggtactcgacgccggcaccaccatgctggagctggcaaaatgcctgacccatcttccgctcagggtgatcacagtcgatctgcatatcgctctgtttttatccgagttccggcagatagaagtgaccatcgtcggtggccgcattgatgacagcagtcagtcctgtatcggcgagtttggtcgtaagatgttacgtagcgtctatcccgatatcgcttttatgagctgtaacagctggagcgtggaaaagggcgtgacgacgccgacggaagaaaaggcggggctgaagcaggagatcattgccaacgcccagcgtaagatcttactggccgacagcagcaaatatggcgcccactcgctgttcaacgtcgctccgctgggccgcttcactgacattattaccgatgtgagtctgcctcttcccgttcaggctgagctgaaagcgcagtccgttgcccttacgctggtacagcctgaacgttaaggataccgccagccgatacggtgttacacgctcggtatattacgtccgtagtagatttcgcgcatctctttccagagcaggtcggtaatcaccttacgctcctcttcgctcaaatcttccggcttcgtgtggaacatatagtgcttaaggtcgaactccttaagcaacatcttggtatggaaaatattttcctgataaacgttcacgtccaccatgtcatacaaagacttaatatcttcggacatgaagttctgaatggagttaatttcatgatcgatgaagtgcttcatgccgttcacatcgcgggtaaaaccgcgaacgcgataatcaatcgtgacgatatcggattctagctggtgaatcagatagttcagggccttcagcggtgaaatgaccccgcaggttgagacttcaatatcggcgcggaaggtgcacagtccgccctcaggatggctttccggataggtgtgaacgcagatatggcttttatcgagatgcgccaccacggtttccggtagcggacccgggtgttctgtctgatcgataagctgcggatcgactggctcttcgctgaccaggatcgtcacgctggcgccctgcggttcataatcctggcgggcaatgttaagaatattggcgccgataatcgaacaggtctctgacaaaatttccgtcaggcggttggcgttgtagagttcgtcaatataggcgatgtagccatcgcgctcctctgccgtttttgcgtagcagatatcgtaaatgcaaaaactcaggcttttggtcagattgttaaagccgtgcagcttcaattttttcaatttagatcacctccttacttaacggtggatagcgcatccagtaaatactgcggtaaagcaaatgccgccgcgtgaatggccggattgtaataacggcacttcaggttcgacttgtgaaaacgggcctggatgatttcactggaaagatggcgcagcgcttcgttgtccgtggcccatgcgaaggtcatgatgccgccgtagtaggtgggaatcgccgcctgatagaagcttacgtcgctaaagtaatggctgagcttgcgatggctatcgacggcctcatcctgttgcaggaagctgacgccgttctgagcgacaaagatcccgcctgggttgaggcagcgcttgcagccttcatagaaggcggaagtaaacaggctctcgccgggaccgataggatcggtgcagtcggaaataatgacgtcaaacatttgcgccgtctggttaacaaaattgacgccatcgtcaatcaccagggtaaagcgcgggtcgtcgtacgcacccgcattatggttggggaggtactggcgacagaatgaaaccacgccagcgtcaatttctaccatggtgatggtttcgacgctgcggtgacgggagacttcgcgcagcatggcgccatcgccgccgccgataattaacacatgtttcgcctggccgtgggccatcagaggaacatgggtcatcatttcatggtagataaactcatcacgttcggtggtttgtaccacgccgtccagcgccatcacgcggccaaaggctgcgttttcgaaaatgattaaatcctgatgatcggttttctcatgatacagaacgttatcaacgctgaaatactgaccaaaatggtcgtgcagcgtttcatgccacagattgctatcggccacgggcagatcctcctttgttaacacctgttacacccattaaaaatgagcgcaacatcatagccaactatagaagatgatgcacggtggatatttcagcaaatgaagcgtggagcattacccgttcacaaagaggggaaagcgcctccccgatgggaggcgccaggatcagggttttttagccagtggttctgccgcagtggcgtcaacgattctgacggtatataccatggtcgctcccggcgggattttaggcggcttgccttcgctgccgtaggcgagattgggagggatcacgaccgttatcgctccgtggtttcccagccgcttgagtggcccaaggaagatgggaggataagatttcagaggctgggaccagactttcccctccgcttccatatcgttaatgacggttccgtcggtaagcgtttccttgatggtgacggtaacgatatcgctgtcgagaatcttgcccttgccggcataatctatgcgactgtaaatgccgtctttcaataccacccctttttgcttcgcgaagttttgttgatatttctttccttcgctaagggtttgctgttcgagcttctttaggttctgaaagacttttttagacacatcgaataaggctttattgcgcgctttctcatcaagggcgatatcccctgaaaaagaatccataatcccctgtaaaacggtatctttactggtttttacgccctgagatgcccgggtagataagagctgcagcacctcctcgcccatcgatacgccgatagcgtaagcctgccgcagaggctcttttgcaaagtcgatagccagcggctttttcgcctcggcgtcagcaagcctggcctttagccgggtaatttcatcggcgctggcctgctgtagggcgtggtcttgatcggcctgctgacggacagcatccgcctgaagggacggctggggcttactgatgataacggcgtctagtttagccgtgagcgcctgtttttctactgccgcggccgccagctttgtcgttaaatctgttttttccgcttcactggcggcgagcttcgctatcgctgctttctgctcggcttgagacgcatcgagtttcgtttgcagcgcccgctgtgcggcgtcagccgcggcgagttttgtcagcatttcctgctgatctgcctctgcagcagcgagccttgttgcgagggcttgcctctctttcgcctctgtcgtgaacttaccggtgagcgcttgtttctccgctgcggccgccgccagctttgagagcgtatcctgcttttctgtttccagcgctgcgagcttctgctgcagggattgcttttcggcggttgcctcagccagctgacgctcaactttttgtttcgcggattctattaatgccactcttttttcctgctgcagcgttttattttctgtggcattacgctgaccttcaatctgttttatttcagccgcggcggatagcgcgttatctattaattgttgtttttcggctacggcagtcgctaactttttctcaagcagctgaattttatccttcagcgctttttggttgtctgcttcggcgttcatcatggccggcttcgcatcaagctgctgccgaagttggcggatgagtttatctttttgagcaattattgcagcctgacgggaaacttcatgggtattcaggacggtttttttattcgttgtttttgtattattgcttttctcctcaacgggctttaccggctcgctgattttttgcgcctgatgctctttagcataatttaaaaatgccgggcctgaagcatcgctatttgagcttgccgtgacgctaataagggcatctttttccgcatagacatccggcgatagcgccagcacaaaaactgctgccagcgataccggattgaagtttttggctattttcccgttcatggctgaacattttcaccacgtttaacaaggctatcgatcagctccttttcaatatcagcgcacagcttgattgatttgaactggtacatcgaatcgatcccctgttttgtcggttctgccactttactgcgcacagaattatattgtgatgccgcgctaagcagggcagtgaactcattgccgagtttgtccgcctgtttggggttcacttctttcagcgactccagcgctttacggcaagtgtctaaacgcgcttgctcatcggcgattctctgctgttcggtttgctgttggcttaatgtcgactcagataagggtttcactaatccggcggattgcctggattgtattgaattacaacccgctaataaaatgagggccagaggcgctatgcttgtaaataaggatctgttcaaggtttcattccattgataaaaagaggtgttatcgggcgataatagtgtgcgaaaaagaagattgcaataatagagtttatgatttttgatggcgtacttttaatattagttatacccgtcatatttcacgctgcttatgcgttggctacgctcgctcaccccttgccgccttcaagtaactctaattatttagggtatatattaatatgttgaatgcttaatgaattatcattgaattctatgaattgagatataaattaagtgctgttgttaattgaattgctattattacgcggcgccatagccgtattcgcacggctaccgtattatgaaatgaagggggggctatttcacgtaagcgagcaggctaagcgaatcgcgggccagcgctttgcattttttagtggtgggaatctggattccgctaaggtcccggtagctatcttcgccgagcgctttcatattgaagctgtcgtaattgcttaaatcccattgattctgctgagcaaaaaagaccagggcacggcgaatctgcgtgttaggcagattttgataaccgcagtcgttcttcagaaagacgaatactgccgttaaatcagccatatcttccgcttcggactcgcttaatgcatagctattggcggagagagtcagcaggctgccaagcactattgttctgaaaagcgtcttcattttttctaccattgaatcacggacaaacaaagttagcacacttcgttacagtgcgccgagctttattcttactcttctgcttgaccttcctgttgggggagggtttaagctcaattattcaccagcagaataaaaaggatgtgaaaatgcaacgtcgtgagtttcttaaactaaccgctgcggtcagcgtggccagcgcattgccgctatggagccgctcggtttttgccgccagccgcccatctttgcctgtacccgaactgcttaccgccgacgcgcgcaatcgcatctcgttaatcattcaggctggaaaaacgcagttcggcccgcatctggcgaccacctggggctataacggcaatctgctgggcccggccctacagcttaagcagggtgaggaggcgaccatcgatattcataaccgtctggcggaagagaccaccgtgcactggcacggtctggaggttcccggcgccgtggacggcggtccccagggcgtgattgccgccggaggctcccgcacggtgacctttaccccaacgcagcgggcggcgacctgctggttccatccccatcagcatggcaaaaccggcagacaggtcgcgatggggctggcagggctggtgctgatttctgatgcagaaagcgaaaagctgctcctgccaaagcagtggggaattgatgatgtcccggtgattgtgcaggataaaaaattcacctcagcgggagagattgattatcagctcgatattatgagcgcagccgtgggctggtttggcgatacgctactcactaacggcgcgctgtacccggagcacgctgcgcctcgcggctggctacgtttacgtctgctgaacggctgtaatgcgcgttctttgaatttcgccaccagcgataagcggcccatgtacgtcgtggcaagcgatggtggtcttctggctgagccggtgaaagttaacgcgctgccggtgctgatgggcgagcgtttcgaagtgctggtggataccactgacgggaagcccttcgatttaattacgctcccggtcaaccagatggggatggcgatcgctccgtttgatcggccgcagccagtgttacgcgtgcagccgctgactatccaggcttccggtaagctgccggatgtgctggccgctatgccagcgctgccctcgcttcagggcctgactcagcgtactttgcagctctcgatggatccgatgctcgatatgatgggcatgcaggcgctgatgcaaaaatatggcgaccaggccatgtccggcatggaccatggcatgatgatgaatcacggagagatggggaatatgaacaatatgaaccacggtgacatgggaagcatgaatcatggcggcacggcgcagatgaagcacggtaataaggagtttgatttccataatgctaatcggatcaatggtaaagcctttgatatgaatgttcccctgtttgcggcggcgaaagggcagtatgagcggtgggtgatttctggcaaaggcgacatgatgctgcatccgttccatattcacggcactcagttccgtattttgtccgaaaacggcaaagcgccggcaccccacaggagcggctggaaagataccgtcagggttgaaggcgatgtcagtgaagtactggtgaaatttgatcacgatgcgccgaaagaacatgcctatatggcgcactgccatctgctggagcatgaagatacgggaatgatgctgggttttacggtgtagaattcgcttcccgtctaagggcgaggcgtgtggcttgtttcgatagaaaagagagagacgtaccatagggagaaggcccggaaaccgggccttctgttttttacttcgcgtcgtccggtaaagcataagcgacgatatagtcgcccatcttcgtgccaaacgaaccgtgaccgcccgcagagatgacaacgtactgcttgccattcacttcataggtcatcggcgtcgcctggccgcccgccggcagacgtgcctgccataatttttcaccgttgctcatattgtacgcgcgcaggtaattatccgcggtcgcgccgataaacagcacattgccggccgtcgagattggaccgcccagcatcggcatacccattgtgaacgggagcttaatcggcatcgggaacggcaggctatcctgcggcgtaccgatacgttttttccacaccacttcgttggttttcagatccagcgcggagatatagccccaggctggctgtttgcagggcagaccaaacggtgacaggaacggattaagcgtaacgccgtaagggacaccgtactgtggctgaataccggcttcggtaccggaacccttggcgtctttaggctgctccatcgggttacctgggccgcgagggatcagttttgagacaaacggcagcgccatcgggttagcaatcgccacctggcggttcggatcgacggagatgccgccccattcgaacatccccaggttacccgggaataccagcgtgccttgttctgaaggcggggtgaaaatcccttcgtagcgcagctgatggaagataacgcggcacaccagctggtcgaacatggtggcgccccacatgtccgcgccggtcaggtctttcttcggacggaagctcaggtcggagaaaggctgagttttcgcgacgtagtcacctttcgccgccccttgcggaaccggtttttccggtgccgggacaaccagttcaccgttgcggcgatcgaggacaaaaatattaccggtttttgccggagcgtaaatcaccggcacggttttaccgttgacgtcgatatccgccagcgtcggctgcgacggcatatccatatcccacagatcgtggtgaacggtctggtagctccacgccagtttaccggtcgtggcgttcagcgccacgatggagctggcatagcgctcttgttcaggcgtacggttgccgccccagatatccggggtggttacgcccataggcaggtagaccagatccagcttcgcgtcataggccgctggcgcccaggagtttggtgaattcagcgtgaaatgatgttcatcatcaggaatcgcgttgggatctttcgcgcccgggtcaaaggcccacagcagtttaccggtattcacatcaaagccgcggataacgcccgacggctcgcgggtggagaagttatcggtcacggcgccggcaatgacgatagttttgtcggtaataatcggcggtgatgttggttcatacatacccggcgtagtgacaggcatgttggtttgcagattgagaatgcctttattagcaaaggactcacacagcttaccggtttcggcattgatggcgaacaggcgaccatcgttgaccggaagaatgatacgacgcgggcagtcggcaaccacatccgccggcgcgttatccgctttggcttcatgatatgaaacgccgcgacaggtcacgtgctggaaagaggggtcagcgttgagctgcggatcgaaatgccacttttctttaccggtggccgcgtcaagcgcgaacaggcgctggtgagcggtacacagataaagcgtgtcgcccactttaatcggcgtgacttcattggtgatttcacccggatcgttaggctgcttgagatcgcccgtacggaagacccaggcttctttcaggttcttcacgttatcggcgttgatctgcttcagcggcgagtagcgctggccttcctgattgcggccatacgccgaccagtcgccatcggctacgtcggaaatgggggccgctggcgttgcatctgcgctcagcgtaccgttgacttcctgcgggtcgttgaagccggcccaggtcaggataccgccgctaatcagcagggcgacaaccagcccggcaacggcgccagaggagggaattggcaggcggcgccagacaaacggcagaataagccagatgccgaagaagaccagaatgtcgctacgcggggtcagcgcccagaagtcgaagccaacttcccatactccccagatcatagtggcaagcagcagcgcggcgtacagccaaagcgcagaacgcttgccgcggaacagcatgacggtgacgcccagcatgaccaggcctgcgacagggtagtaccatgagccgccaagagcgaccagccaggccccgcccgctaaaagatacaggccacagaacgctgcaaaaagagccgtcagcgtcacgagtagccgtgattgttgagattttgtttctgccatagaaggacactcgtttgtttgttaattttttaactgcaattaagtataggatttaacaagtgtgatcggaatcacaaaatgggctttattaatcactgcatcgcatatttctttttactggtatactgcgtggcttgccggtcaacgtcggtgcaatcgcagcggctttgatgatttacattaagaatcaaatggttagttttatgaaacatactgtagaagtgatgatcccggaaactgagatcaaagcccgtatcgctgagctcggtcgtcaaattaatgaacattacaaagatagcggcagcgaaatggtgctggtggggctattacgcggttcatttatgtttatggccgacctgtgccgtgaggttcaggtaccccatgaagtagatttcatgaccgcctcgagctacggcagcggcatgtccaccacccgtgacgtcaaaatcctcaaagacctggatgaagatatccgcggtaaagatgtgctgatcgtggaagacatcatcgactctggcaatacgctgtcaaaagtgcgtgaaatcctcagcctgcgtgaaccaaaatcgctggcgatttgtacgctgctcgataagccaagccgccgcgaagtgaaggtgccggttgagtttgtcggttttgcgatcccggacgagttcgtggtggggtacggtatcgactatgctcagcgctatcgccacctgccgtatatcggcaaagtgacgctgctggacgagtaacgcggagtgtctatcccggcttatccgggatagttaagaggggcgcgtgaattacctgtgattgacgtgcttgcttttaaggttggaaatgccctggcgatagcgctgctccagcgtttcgcggctgacggcggtcacgtccagatcgcgtaacatgccatcgtgaatgccgtaggcccagccgtgaatcgtcaccttctgtccacgcttccacgccgactgcataatcgttgaatggccaaggttgtaaacctgctccatcacattcaattcacacagcgtatcaaggcggcgctcttcgggcatttcccccagcagcgagctgtgcttaaaccagatatcgcgaatatgcagcagccagttgtcgataaggccaagctcggtattttcaatcgccgcctgcacgccgccgcagccgtagtggccgcagatgatgatgtgttcaacctccagtacgtcgaccgcgtactgcacgacggaaagacagttcagatcggtatgaatcaccaggttggcgacgttacggtgtacaaacagctcgccaggttccaggccggtcaaacgttcagcggggacgcggctatcggaacatccaatccacagaaagcgcggcttctgcgcctgtgccagtttctcaaagaaaccggagtcttcctccaccagcatttttgaccatagtgcattgttgctgatgagtgtatctatatcgttcatggatgtttacgggcctgtaaccaagtaagtgcgttgcgctaatataggttaacctcacattttttaaaacaacccatcgcgtgtcacgacacgagaagagacatttaatgaccattgctctggaattaaaacagcttaaaaaaacctaccccggcggggttcaggcgctgcgcggaatcgatctgcaggttgaggcgggcgatttttacgcgctcctggggccaaacggcgcgggaaaatccaccactatcggcattatcagttcgctggtgaataaaacctccggcgaggtcaacgtgtttggctatgacctgcaaaaggatgtggtgaacgccaagcgccagctcggcctggtgccgcaggagttcaactttaacccgtttgaaaccgtgcagcagattgtgattcaccaggcgggctactacggcgtcgagcgcaaagaagcgatcgcccgtagcgaaaagtaccttaaacagctcgatctttgggaaaaacgcaacgaacgcgcgcggatgctctccggcggcatgaagcgccgcctgatgattgcccgcgcgttgatgcacgagccgaagctgctgattcttgatgaacccacggcgggagtggatatcgagctgcgtcgttcgatgtggggcttcctgaaagatctcaacgataaaggcacgacgattatcctcactacccactatctggaagaggccgagatgctgtgtcgcaatattggcattattcagaacggtgagctggtggaaaacacctcgatgaaggcgctgctttccaaactgaaatcggaaacctttattctcgatctggcgcctaagagcccattaccggtactggaaggctatcagtatcgtctggttgatacgtcgacgctggaggttgaggtgctgcgtgagcaggggattaacagcgtatttactcagttaagcgcgcagggcgtacaggtattaagtatgcgtaacaaagctaaccgtctggaagagctgtttgtcacgctggtccatgaccggaaaggagaatcagcatgatgcagctttattgggtcgcgctgaaaagcatctggaccaaagagatccaccgctttatgcgtatctggatccagacgctggtgccgccggtcataactatgaccctctactttgttattttcggcaatctgatcggctcgcgcatcggtgaaatgcacggtttcacctatatgcagtttatcgtgccgggcctgattatgatggcggtgatcaccaacgcctacgccaacgtggcgtcctcgttcttcagcgcgaaatttcagcgcaatattgaagaactgctggtcgcgccggttcccacccacgtggttatcgccggctatgtgggcggcggcgttgcccgcggtctgtgcgtcgggattctggtgacggcgatttcgctgtttttcgtaccgttccaggttcactcatggatattcgtcgccctgaccctggtgctgaccgccgtgctattttcgctggccggtctgctgaatgcggtgtttgccaaaacctttgacgatatcagccttattccgaccttcgtgctgacgccgctgacctatctcggcggggttttttattcgctgaccctgctgccgccgttctggcaagggctgtcgcatctgaacccgatcgtctacatgatcagcggtttccgctacggtttcctcggcattaacgatgttccgctcgccaccaccttcggcgtgctggtggtgtttatcgtcgcgttttatctcttgtgctggtatctgatccagcgcggacgcgggcttcgcagctaatttagccaaccacggcgcttcgctgccccgttcagcgaagcgccggcaaacaattttgattgtcatcaccgatattcatctcttcccttgctacattgtttgcctgctaaggaggtgggcgatgttaggttgggtgattacctgtcatgacgaactggcgcaggagatgctggatcgtctggagaaaaagtttgggccgctgacgcagtgtcgggcggtcaactactggcgtaatctcagcagcaatatgctgagccgcatgatgtgcgatgcgctgcacgagacggacggcggagacggggtcatttttctgaccgataaaaccggcgcggcgccttatcgcgtggcggcgctgctgagccataagcacacccactgtgaagtgatttccgggatcgactattcattactggaatgtatgtatttgctgcgtcagagtctgagcagcgaagccttccgacacgccattgtcagcgccggaggcccggcggtgagcagcctctggcatcagcagcaaaaaaatccgccttttcgactactgcatgagccgtacgggaattaagcattggtattgatgaggcttttgttacaatgacggcagttcttgtctaccggctcgatgcgcatgtttgcccgaattcttgctttactcctcctgttcacggcgctaagcgcctccgccagcctgttaagccagcagggtgtgccggcacgttatatgcaaacgaccgaagatgcggatatctgggcgcaggttggcaatcaggtggtgagcgtcggtaacgtgcgggcagggcaaattctggcggtagtaccgacggcggcggattactatgagtttaattttggctttgcgaccggctttatcgataaaggccacctggggccggtacagggtaagcagcgggtggaggatagcctgggcgatctgcataagcctctgagcaaccaaaacctcattacctggaaagatacgccaatctatgatgcccccgccgtgggcagcgcgccatttggcaccctggcgaataatctgcgttatccgattatcagcaaactcaaagatcggcttaatcaaacctggtttcagattcgtatcggcaaccgcctggcgtgggtgagcagtctggatgcgcaagaagataacggcatccctgtactgacttatcaccatatcctgcgtgatgaagaaaatacccgctttcgccatacctcaacgacgacctccgtgcgcgccttcagcaatcagatgacctggctacgcgaccagggctataccacgctcagcatgtatcaactggaaggctatctgcgtaataaagtgaatcttccggcgcgtgcggtggcgatcacctttgacgatgggctgaagtcggtcaaccgctatgcctacccgatcctcaagcagtatggctttcacgccacggcgtttattatctcgtcgcgcatcaagcgccatccgcagaaatgggcgccgaaatcgctgcagtttatgagtatttccgagctaaaacagatccaggacgtctttgacgtgcagtcgcatacccacttcctgcatcgggttgatgctgaacgtcatccgatcctcctcagccgcagctatcacaatattctgtttgattttgcgcattcgcggcgggcgctggcgcagtttaatccccacgtactgtatctctcttacccgtttggcggctataacgctaaggcgatccaggccgccaacgacgccggttttcatctggcggtgaccacggtgagggggaaggtaaagccgggcgataatccgttcttgttgaaaaggctgtatatattaagaacggattcgctggagacgatgtcgcggctgataagcaaccagccgcaggggtagatcagaaataatcgatggtaaacgtgcctatcgctttaaattttcccggctttagctcaccggatgtgcgggaaagccaggcatcaaagctatagtcatatgatgacgaattgctgacgcttgttgacggcgaccatatttctaaaccgggctgcaggttgaaaccatcggcggtagtgaagttcgacgctaaccctactcctacgccagttgccgcatcgctgccggtgagcgtattggtcattagcgtcacgccgccggtcacgctcaattctgatttaggtgtggcaagcttcatacgtacccagacggtgttattgcatccgcttaaccttaacgtaaacggtgttctcggccagtagccttcccggaaagatgagaacatgacgtcgccgaagttcacgttattggtgccgttattgaccatggcggaagaacacgttgcggccatgaccagtatgctaaagctgctgggattgacgttaatcgtccacgggttattgtcatctgaatctgccgaaccgacgcggatttgacccaatgttcttgaatctttagggtaaattctcatgtcgtggttgaggtttccttgaaaagggacgtcctgatacaaggtcacagagtactttaattgctggttattccagtacgactgattgccgccgctgacccaaacccagtccttgctgctgttaacctctggcaaatatccgccgccgccggcctgggtgtatattcttaccgcataataaataccctctatatttgtagggaaaagtgctctgccgtctacggtggtcggcgtggcgcttgggttggtttttgcataaaaatcaaatccatcgtttcccgcatcgcattcggtccggagagcgtaactggactgaatgtcgaaggtaagcagctcgggtttcttgcttccctggtcacctaatgctgtcttgaatgttattggataggtggttacaccgttgttcagcgttaacgagccgcttctgccatcgtcaagatggcactccttggcgctggcgccaaagctcagagccagcagcgcgaatgggtataccatcaatttgatcatctcatcctccctgatcactggtaaatagcgtctaccaggacatgactgttaactttccctggggtaacggtgcccgtattttgatagcgggcataaaaatcgtagctggccagatagttatccgcttttgaaacatcaataaccacggcggagctaccgtcgctattcacaacgttacggttatcgtgggtagaaaaaatgacaatcccgacgttctccgccccgcctgcggcggctggcgcttcattgataaatacctgctggctttccacgggccagatcccattttgtggcttaaagccaaaggtgagagtattgaccgtcgtggcatcgcctgagcagctttcaacgttcacgctaaatagcgtcccgctggcagggtcgccgggctgcaaacgcgaagtgccgtcatcgttataaaaccaacggcgggaaaccgtaggtagatgaacggttccattgccagagatggaaatctggcaggtattttccacaatattggctgtcagggtgacgtccagcccttctttattttcattcgcggcatccgcaaaataaggagccatgcacagcccgcctgccgctcccacaaccagcaacgccttcccaactgggccgattagacggatacagaatgacatagcggtgctgctccttttaacttactgataggtgataacaaacgtgacgggagagctgacgctacccgctgtgacgttggctatttttctatctttagcgataacaatgcgcgaagcaaaactgacgctgagcgaacgaccgctgatgctgagcgtttgtgagggcttgttattacagctaagcaacgttcccgttccggactccccttgccacacttcaaaagccgttgagttgcctgcggcaaaagagtcgccgttcgaacttgggcccgagcagccgccaccgctgccgggaatgacttgatatttggcggatttcaccccagaacagtcgctaaaggctaccttgaacggttcgctgcggctttgcttaaccagatcggatttaaatacatcgccgaaattcagcgtactcatgggctgaccgctggcgttctgaatctgcgccgtgcaggtaccggcttgaattgtcgaggtaaaagtggcggaaatgctgctggttccggttatctcggcaatagagggcgcagaaaaaagcaacgtgccgacaacaccgcccagaaaagagatttttttcatcaagaggttccttttctgatgattattcgtaggtgaagttgaaagtggccaaagcgctaaaggcacccgtcgtgccttgtcccgtctgcgtttcaaccagcgtcgcgaccagaggaacttctttgttgttaatttcctggctggtccataccagtcgacccgtgtccgagcccgcattaatcacgaaaggggcatcggtggcggaagctctggcgatagtgatcccaagggctcccgcagcatctgccgttgcgttaccattcagaatcaccgtctctttttccgccgatttcgtcccgctgatggtggttttaagcgactgcaggctgctcgggcattccgtgattttcagcttaaaggttgcctgcgccgcgctgtcgccgctgataattttatccaggctcactatgccattcgcgccgacaggaatggtgttgtttttgccatcgccgctgccgccttcaatggccatatcgcaggtcgtttcgcgcaggttagcggtaaaggtgacatccagcgatgttgcctgacccggtaacgcggtagcgagtaaaatgccgctacagcccagcaggcagcgttttctaaaactgattatcttcattctgttccctgtaaaaaagtgccgttacatctggcagcgttgatgactcagtagacgggtaagccccacttttctatcggcaccgctatcagcgagctgataatgaacggtgcagcgtccttcgcggccgcttccccagataacctgtagtgttccgctttccgtgacgccgcgaacataggccataccggcctgtccgaccgtgccgatagattcgccccgttcgttttgcacatccgcgccgagcgggataaaccccttgtcggagcgctgaagctccagcaggagtgagcgcccttcgttggtttcgaaatcaacccgcacaacggagccactgcgggggaccacgaccgtactggtattcttcacttcaacatcttcttccattgtgtcgatgttgagaccgacgctattttcccgataggcggataagtaaggttgaatggcatagccaaagcgattaatacgcccgtcgccattcgttaaacgagcgccttccgccccggaggcgtgcaccagcgccagggtatcggtatcgccaatactgcccggggccagagtcaagccgccggaatgcagcagcatgccgccgctgtagctcatggagtactggcggctgtcatcatcggaagcagaagccgacaggcttaagggcccccacgggctgctgtagctgccgtaaccgccaacctggttgattgacgagccatctgaccggctggcgctggtgttaaggctgtagctgaagcgatagtcgtcggtattgccgttggcgctggtggagatgttattgttcgacttcaggtcgctgttgacgctggtattgatggttgaaaaaccgagcggccgtttgttgtgtcccagcaggttttccagcggaatactcagattgaggtaaacgctgtcgtccttatcgccatattcgttataggaacgctggagtgaaacgctatagctggcccatgaaaatgcgtcgttataaccgatagagtactgggaggtagaggaggttttgttccagtaatcctcccagctaccgcttacatacaggttgccgctgctggattcccaaagggatatcggctgactcacattgacctggaactgatttttcatccgctgaaaacgggagtactcctgctgcgacgcattatcatgacgtttgacgttgctatttaaggtggccgcgtcgcgtaacgacatatagttttcggtggagaaacgccaggcggcaatgttgaatgaggtatttgattccctgagtagtttgctccacgtcacgcgatagctctggcccgtcagggtctccagattatccatagcggttgttgaatgcgtgatgtcaaaagcgaacgcgccgatgggcgtattcgtcgcgatacctgctaacccggcgtagtagccgatatccatatactgaaagccagcatagccggtgaaggtgttgtttaagccgtaatatcccgtggcgtaacctaacctgggcctgtcatgtaaaccgtcatcatgcagttccccggcgccgatatcccagcgtccatatccgggcctgagcatttgagtgaccgatgagtagggtaccgagaaagtacggatgctgccgtccgcttcttcaatggagacatccaggtcgctaccatagccggtagtgctgagatcggtgatagcaaagggccccggtgggacggtggtttcataaatcttattaccgttctgcttaatcacgatcttcgcattacttttcgccacgccgcggatctccggggcgtaggttgaggcgccgccgggcagcatgcgatcgtcattgtaaaaacgtacgccgcgcaggctgaacgaatcgaagccatcaccgcgggtataagagtcgccgatcagaaactgcgagcgtaatgcggcgacatcgcgctggagataaatatcctggctggtgtaatcgctaccggagtcttcatcccagttggcgttgcccctggcccgtagatgccaggcgccgacattcacgccgtacttcaatccggcataaaccgaatcggagctgctgctgtcgctttcgttatgccaggcgttgagatcgtaagaaaccatcgcggcgttaatcccgttctgccagagtgaaggatcgacgtaaccgttagggtgtttaagggtgtaaatttgcggcattgagagcgagagctcctgggtgccgatatcataattccacgtcgattgcggatactgttgcgcaatatcgatacaggccgcggattcgagatccattcccaccgtttttacgccaatttgcgccagcagctttgcggtgaagcagggcgttgcgcgaggcgtaccgttatcattaaaggtaaaatccaccagcatcttcggctgattattcagtaaaacttgcgtcttataggtgcccggcggcaccggattccctttagaaaaacggctgacgtcaatattgctaccggtactgaataaaaactgatcgttaaattcaacttcatctgaagccgctgaaagcgcttgttccgccattactgaggacggcagtgcaatatatagcgttgtacacaataacgatcgacgaaaaaacatgttgtccctgttcttgtaaaggctgaggtccttcagcagtaacaattaattgatggtggcttgatgtttttcggtaccaccaaaatcgttaatagcgatatattcaattccccctccctgtaatgctggcgcatttttaacgggaatcgtttcatgagagagcggaggaatagtgtgagaatcgacctctattttttttcccttcacggtaatggtcgctttagccattgatatataataagggctgctattattggcgattaacgcggttccttgctgcgtccattgcagattaccggcggcaaccgccggatcgccctgcaaaccatccgggcgaaaaaacatcttaatgcgggtgcgaaacgccagctgcaatgcgttttggctatcggcatcttttgcttttggcggcacctcaaggacgttaaaccagaacagcgattcccgatcctgggccagaggttgttgggtccacgtaatacgtacggtttgccccttcgacgggtcgatgcgcgagaccggcggcgtgacgacaaacggcagcttcagctcctgaggattaacggtatcgcgaccgtcatcaagccacgactgtaccagcagcgggttattaccgcgattttccattttaacggtgacgtctttggacgactggggatagataatacgggtgccggaaataacgatatccgcacgggcattaagcgtactgaacgccgcgctggcgcataccagcgatgtcagcgtaagttgggtaaaacgatccataaccatcagctccctgcaatgcgcctgctttcagccgcagacgcacaatccattacgttacgattactcgtaagacatagtaaacgtcgcgttgctcgtcactttacccgcggtgatatcgttggtgcctttcacccaatcggcgcctggaacgtaggcaacgcgataagccagtacgccttcgccgcctttcagggtggcgacctgcgtgttgttattcggcaggccaacctgaatgcgactggtgtcggtggtgctgttgttaaacagcgccaggctcacgttatcggcatgaccggtgacgctcggatcggttttcagcgtgccgttagagagttcggcaaactgctgagaggtaaaggtcgcggatgctttggtcagcgtgtccgggcagctgctcaggtgcagttcgaactcttttgagccaacgcctgcatcaacgctggtaccttcaacttctgatttttttaccaccggcatgctaatggtgacgttgtttgcattaatgccgttattagtggtgatggtgcaagtggtatcagaaactgcgccatcaaatgtgataagaccaacgtcgttaccgattgtagttaccgtatcttcagcaaatgcggaagcggagcccaaagccagaataattgatgcggcagcaatggttaacttattcatagataaacatccatataaaattaaactttcccataacgcgtgggagcagcctaaataatatttaggtgccaatgattctattcttttagatgagggctaatacttaatatttttacaaaataatgtaagtaatgacggattgatttttgctttctatgtgtgataagggggtaagtctatttttaaataatctaatgatgtgattgagaaaggtagtgggggggtaatattgatcacaatgatcatattatatcgaagaataatataaatcaaaaaaataatagctccggatagagtttcggagctattgataatatcaggcaacctgcaccggaatcgctttggcctggcgcttcatttcgttttcgccttcgaaataggccactttcggctgccaggtgcgggcttcttcgtcaggcatggtgacgaagctggcgataatcagaatatcgccgacgctcgcacagtgtgccgccgcgccgttcacggagataattcgcgaaccgcgctccgcggcgatggcgtaggtggagaaacgattaccgttggtcacgttccagatatgaattgcctcgttttcaaggatgccggacgcatccaggaaatcctgatcaatagcgcaggagccttcatagtgcaggtcggcctgcgtgacttttacgcggtggagtttgccctgcagcatattacgaatcataacgtctacctttaaagcttaacgataacaaagcggacgtgacgcccgccttgaggaaattccaggcagtattgcccgatttttaacccgtgtctaccgaacgagcgccactatctggttgtcgatcaaacgcgcttcgccgagccatgccgccatcaggatcaccgcgcgctggctgttttccgtcaggtcgagcagcgtgtcggcatcgcggatctggatatcatcggcgcggaagcctttttcgttcagctcctgcgcggcaatcgcgataatctcgtcaagattgcgctcgccggccgccagcttctccgccgcgccattcatcaccttatacagccccggcgcaactttgcgctgatctgcgctgagatagccgttgcgtgaactgagcgccagcccatctttcgcgcgcataatcggtacgccgataatctcgatgtcgtagcccatatcggccaccattttgcggatcagcgccagctgctggaagtctttttcgccgaagcaggcgacgtccggctggatcaggttgaacagcttgctgacgatagtggaaacgccgcggaagtggcccggacgactggcgccctcgagcatcgtcgacagccccggaacatccacgtaagtctgattttcgaggccgtgcggatagatttccgccgcggcaggggcaaagacaaaatcgaccttacgcttgttcagcttttcgcaatcgtcctgcagggtacgcggatagcgcgccagatcctcggcgcggtcgaactgcatagggttgacgaagatactggccaccaccacatccgcgctggctttggcggtatcaaccagcttcatatgaccatcgtgcaggttgcccatggtgggaaccagcgcaatgcgcttgccttcctggcgtaaacgacggatatgctggcgcagcagcggcagggtttcaataatcagcacaacaacactccttaatggaaactgtgttcttcgcccggataggcgccggactccacttcggcaacatattgccgtaccgcggcgcgcatgtcgcccgctgtgctcaggaaatttttggcaaatttgggaatatggccgccggtaatgccgaatgcgtcatgcatgacgaggatttgcccgtcggtgacgttgcccgcgccgatgccgatcaccgggatggttaacgcctcggtgacgcgtttcgccagctcgaccggtacgcactccagcaccagcagctgtgcgcccgccgcttccagcgccagcgcgtcatccagcagaacttgcccggcatcgccgcggccctgaattttatagccgccgaagacgttcaccgactggggcgtcagaccgaggtgcccgcacaccggcaccgcgcgctcggcaagcattttcacggtgtccgccagccatgcgccgccctcgattttgaccatattggctcccgcgcgcatcacgatggcggcgttctcgaaggtctgttccggcgtggcgtaagccataaacggcagatcggcgagcagcagacagttgggcgctccgcggcgcaccgcgcgcgtgtgataggcaatgtcttctacggtcaccggcagggtggagtcgtggccctgcaccgtcatgcccagcgaatcgccgaccagcatcacgttgataccctcatcggcaaacagctttgcaaagctgtagtcgtaggcggtgatagtggcgaagcgtttcttctcctgtttgcatttctgcagcagggcgatagtggtcggtttcataacgtttcctgatgatgaaagtcattttaaccggcattctagcagccgcattcaggggggcaatggttttaggcaaccgattaccacgatcgccgtaattgctaaaaaatgaaggggtattaccaggcggcgggtttttccgcgccgagattggccagcacgtcgcgcagcgccgggccgtcggggaaacgcagctcaggggcgatttcaaacagcggccacagcataaaaccgcggttttgcatatcgtagtgcggtacggtcaggcgcggggtgttaatcacctcattgccaaacagcatgatgtcgaggtccagcgtgcgcggtccccagcgttcagctttacgcgtgcggccctgctgcagttcgatgcgctgggtgtgattgagcagcgcgtctgcgtccagggtcgtttccagcgccacggcggcgttgagatagtcaggctgatcctgtggccccagcggcggcgtacggtagaaagaggaaacgcttatcacccggctgccaggaatctccgacagcgcgttgacggcagcgttaacctgctccagcggcgaggccagattgctgccgatagcgatataagcgagcgtcatgcgctaccttcgcgacgcggcgcgcgtttgcgcggacggcggtggcggcgacgtggagccggatcgtcgcctaaatcatccagcatatctttctgagccggcggcgcggcgacctggaactcgccccaccatttggtcaggcgctgtagttcgctattgttctctgcgccggcgcgcagctccagcagatcgtaggcggcgcggaatttgggatgctccatcagcttccacgcgcgtttgccctgacggcgggacatccgtagctgaagctgccagatatcgcgcaccagggtggtgatgcgtttcgggatcgccagcgtacggcaggcctcgtccagcacgtcgttcatcgccagcgcgaaggcgtcgtagtaggccagcccgctttcctgggcgattttctgcgcggtttccagcagcgggtaccagaacattaccgcgaacaggaacgccggattaacgcgcatgtcgttgcgaatgcggttatcggtattcttcagcacctggctgatgatgcgctccatcggactatcgccgcgctcggtgaagtagcgggtaatggtcgggaacagcggctggaacagattatattcgcgcagcaggagataggtttgatagccgtcgccggcttgcagcagctttaacacttcttcaaacaggcgtgccgggggcacatcgtgcagcagcgtcgccaggcgcgggatcggttcggcggtctcttcgctgatgctcatactgagcttcgccgcaaaacgcaccgcgcgcagcatgcgcaccggatcttcgcgatagcgggtttccggatcgccgatcaggcggatgacgccatcctgcagatctttcatgccgccgacgtagtcgcggacggtgaaatccgccacgctgtaatagaggctgttgatggtaaagtcgcgacgctgggcgtcttcttcaatcgaaccgaagatattgtcgcgcagcagcatgccgttctggccgcgctgggaggtgacgcgatcggtggtgtggccttcgtgatggccgcggaaggtcgcgacttcgataatttccggcccgaacatcacgtgcgccaggcggaagcgacggccgaccaggcggcagttgcggaacagcttacgcacctgctccggcgtggcgttggtggtgacgtcaaaatctttgggttttttgcccagcagcagatcgcgtacgccgccgccgaccagccacgattcgtagcccgccttattgagtctgtacatgaccttgagggcattttcactgatatctttgcgggaaattgcatgctgctcgcgcgggataaccgtcatatgtagttgttcgacggcggcttctgcctcgcgctcttcacggcttagcaccttacggcaaaaattagcgactcgggtaaaaatggtacacctcgtagtgtcagacggacttcaggacaaaaaaatagcggctaatcatagctcagcagaacgcatttgagaatgctggatttgctccggccgccagttcgctaccgcgtacttgagtaaatcctcaatgctcagcgtctgccattcctgaatgacatcctgattaagaaacgttagcgcccgcacaatttccgggcgcggatcgcctgtagataacgccggagcgtggttttgcttcgacagtttattgccctgcgcgttgaggaccagcggcaaatggatatagtccggcgcctgccagccaaaatgctgatagagcgaaatttgccgcaccgtcggctcgataagatcggcgccgcggacgatttcgctgacgccctgaaaatgatcgtccaccaccaccgccagattataggcgaacagcccatcgcgacggtggataataaaatcttcacgcgccagaggttcgtcggcgacgatcgtaccgcgtagctggtcataaaattcaaggaccggacgcgtttgccgcaggcgcagagcggcgttttccgcgccgaggcgtaaatcccggcagtggccgtcgtaaaggccgccgatagcgtggatacgcgcgcgggtgcaggtgcagtagtagcagaggccctgctcgcgtagccaggccaggcgctcacgataggcttcgtggcgttttgactgccagagtacctctccgtcccagtgcaggccgaagtgctctaactgacgaagaatagtctcggcggcgccggggacttcacgcggcggatcgatatcttcaatgcgcacgcgccagataccgttctgcgcccgagcctggagatagctgccaagcgcggcaatcaatgagccgaagtggagttcgccggaaggtgagggggcaaagcgcccgatgtagtgggaatctgtcatcgtatgactaaagcatcagagcgggagaaagctcccgccagagatgcgtcagcgaagtgattagcctgccatctgtttttcgcgaatttccgccagcgttttgcaatcaatgcacaggtcggcggtcggacgcgcttccagacgacggataccaatctcaacgccacaggattcacagaagccgaaatcttcgtcttcgacttttttcagcgttttctcgatctttttgatcagtttacgttcgcggtcgcggttacgcagctccaggctgaactcttcttcctgagcggcacggtctaccggatccgggaagttagcagcttcatcctgcatatgcgttacggtgcgatccacttcatccctaagttgattacgccacgcttcaagaatgcgcttgaagtgcgccagctgggcttcgttcatatactcttcgcccggcttcacttggtacggctccaccccagcgatggagagaatactcagggacgatgttttacggttttgcccttcttgcatgttgcttctccttaacacgcactatcgatccccgtgttgggggaaaaatcaggccgctataaatagcagatgcttttccggatagcaattatctaaacgttacacttgacaaccctgtgaggaaaagcgtatttgcgctcgcgacccgaatactatttagccgtttatttaccgggggttaacaccacggtaatcggcttattcagagtcatcatctcggtagaaagttccgccttgtaggcgagaatttccacccccttgttttgcgcctcaatcaatagctgtgcgtatctggcatcaatatgatgcgcgggtgagaaacggtctatcgccgagtgcagcacggcgaacaaaatcaccgcccgatcgcccgctgccgccacgctcatcagctcccgcaggtgcttctgaccgcgtgcggtaaccgcatcggggaagtaaccgtattccttttccgccaacgtaaccgatttcacttcaatatagcagttttgttggtcatctgcttgtaacagaatatcaatgcggctgctttcatcaccatacttcacttcgcttttcagcgcgttatagcccaaaagctcgggaatatttcctgccagaatcgcctcttttgccaacgtgttagcacgtagagtattaacacaaattgtcgcgccctctacggtttcagttaattcccacgtgtgggcatatttgcgcttaggattatctgaggtggaataccagacggtatcgcccggcgcggcgcagccggtcatggcgccggtgttggggcagtgcagggtcagctcgcgaccgtcgggggtgaccacgtcggcgagaaaccgtttgtaacgtttaaccagggtggcggactgcaggggaggagtgaacagcatcagctttccttgtcgaagggataacgttccagcgcctgatagcgggtgcgcccgcggctaaagctggattcgtagagcacaaattcgttgaccgcaaacgcccagctaaatccgggcggcggaatcggcaccgcgtggcgcgcgtcgcgcagcagggttatatgcggatgaaacggctgcgggctctgatagcagccgctgcgggcggcctgggcgcgcagcatattcgctaattgcagcaccccgcgcggcggctgacgggtgcccagccacaccacccgcgaacgcagccactgcccggcatcgtcaagcgtcagggtaaagcccggctggcggatccgtccggccatcgctgacagcgcccgctgcttgtccgcgctcacctcgccaagaaacgccagcgtcagatggaggttagccgccgccaccggtcgccccgcatcgccgggaaagctggcggcgcgccagtgcacgatctgctgctgaacgtccccgggtagttcaatggcgaaaaacagccttttcggcttggacatgatagagactcggtaatgaattaccgggatgctacaatgcttgcccgcaaatgttaacctccggagcgtttcgtgtcctcattgccggttgccgccgtcctccctgaacttctttctgccctgcggcatgcgccgcaggttctgcttaatgcgccaaccggcgccgggaaatccacctggctgccgctgcaaatcctcgccgaaggtaacatcaacggacgcataatcctgctggagccgcggcggctggccgcgcgtaacgtggcgcagcggctggcggaactgctgggagagaagcccggcgagaccgtgggctatcgcatgcgcgcggagacctgcgtcgggccgaacacgcgcctcgaagtggtgacggagggcattttaacgcggatgatccagcgcgatccggagctgagcggcgtggggctggcgatcctcgatgaattccacgaacgcagcctgcaggcggatctggcgctggcgctgctgctcgacgttcagcaggggctgcgcgacgatctcaaactgctgattatgtcggcgacgctggacaatgaacgcctgcagcggctgctgccggaggcgccggttatcgtctctgaagggcgcgcgtttccggttgagcggcgttttctgccgctgccggcccatcagcgctttgacgaggcggtggcggtggccgccgcggagctgctgcgcagcgaaaatggctcaatgctgctttttctgcccggggtgggagagattcagcgcgttcaggagcggctggcggagcgggtggcgagcgatgtgatcctttgccccctgtacggcgcgctgccgctgagcgagcagcgtaaggcgatactgcccgcgcccgccgggatgcgcaaagtggtgctggcgaccaatatcgccgagaccagtctgaccatcgaggggattcggctggtggtggatagcgcccaggagcgcgtcgcccgctttgacgcccgcaccgggctcactcgcctggtgacgcagcgcatcagccaggcctcaatgacccagcgcgccggacgcgccgggcgtctggaaccggggatctgcctgcatctgctggctaaagagcaggccgagcgcgcggcggcgcagggcgacccggaaattctgcaaagcgatctgtcgtcgctgctgctggagctgctgcagtggggatgccaggacccggcccagctcagctggctggatctgccgcctgcgaccaacctggcggcggcccggcgtctgctcaccgacctttctgcgctggaaggcgagcggctgtcggcgcacgggcgcaaaatggcggcgttgggcaacgatccgcgcctggcggcgatgctgaccgcggcggaggatgccgatggcgccgccacggcggctaaactggcggcgatccttgaagagccgccgcgcggcggcaatagcgatcttagcgcggcgtttgcccgtcagcagggtaactggcagcagcgggcgcagcagctgatgaaaaggctggcggttcgcggcggtcagcccgatgccgacagcatcgcggcgctgctggcctccgcttttgccgaccgtatcgcccatcgtcgcggccaggaggggcgctaccagctggctaacgggatgggggcgatgctcgacgccgacgatgcgctgggccgccacgaatggctgattgcgccgctgctgctgcagggaagcgcatcgccggacgcgcggatcctgctggcgctgccggtcgatattcacgcgttgattgagcagtgtccggccctggcccggcgttccgatatcgtcgagtgggatgaggcgttaggaacgctgaaggcctggcggcgcacctgtatcggacgcctggtgattaagacccagccgctggcgaagccgtcggaagaggagctgcaccaggcgatgctcaacgggatccgcgagaagggactgagcgtgctaacctggacgccggaggcggagcagctgcgtctgcggctacactgcgcggcgcggtggctgccggaggaggcgtggccggccgttgacgaggcgtcgctgctggcctcgcttgaacagtggctgctgccgcagatggcgggcgtccattcgctgcgcgccctgaaggcgctggacgtgcgtcaggcgctgcaaaactggctgccgtggccgctgcgccagaagctggacagcgagctgcccacgcactatacggtgccgaccggtagccgcatcgcgattcgttatcacgatgaaaacccgccggcgctggcggtgcggatgcaggagatgtttggcgaagcgaccactccgactatcgcccaggggcgcgtgccgctggtgctggagctgctttcgccggcgcagcgcccgctgcagatcacccgcgatttaggcgccttctggcaggggagctaccgcgaggtgcaaaaagagatgaaagggcgctatcccaagcacgtctggcccgacgatccggccaataccgccccgacccggcgcaccaaaaagtattcgtagccggagagttcccgggttgcggcgtaaacgccttatcggggctaccggaccagtaccgccagtagccctgctaagcgcagcgcgagcaggggatgttttatacctggctccacaaaaagatgccgccgcccgccagcgccagccaggggccgaaggccagaggttgttcgagcgaacgacgggttaccagacgctgcagcagcgtccagaccagaccgctggcggaagccagcagcagcgtctgcggcagcggctgccagccgagccacgcgccgagcgctgccagcagcttgaaatcgccgtagcccagcgcctctttaccggtcagcagacggaacacccagtacaccgaccacagcgacaaatacccgaccatcgcgccaatgaccgcctccgccagcggcgcgaaggtatcggaaagattgaacagcagcccggcccacagcagcggcagcgtcagcctgtcaggcagcagctgcgtttgcgcgtcgatggcggcgaggatcagcagtacggacacgaaaattagcccgcccagcagcggcatgcccggagccatcaggtaccccgcgagtacaaacagcgcgccggtcgtcagctccatcaggggatagcgacgcgagatcggctgcccgcagcagcgcgcgcgccccctgagccataaaaagctcagcagcgggatattgtcccgccaggcgataggctgacggcactgcgggcagaacgacgcggggaggcagagattcaccccctctgcgcgttccatcatcagcggtaaacgatggataacgacgttaaaaaagctgccgaacgccagtccggacaggaataaaaagccgccccagattgacgggtattgcgcggcgaactccggtaacagcgcgatattttccatctctattttttctccccggagcgccactgcccctgccactgccacggcgtgcgcccctgctcatctttgcggccgttttgcgcgagcagcagcgtcagcagcgccggagtcgtctggcgggtctgcagcgtaccgttaaacgtatagcgcccgttgggcgtcagaacgccctgtcctgcgaggctaagctgacgggagtcctgggtcagggcgacagtcagcgtgcccgccggggtacagcttaatttgccgttgacctgggccagttcgagcgacccggcgggggagctgagcgccgcattccgccactgcacggtgctggcggtcatctgtcggcaaccgccggcgttaaagcgggcctcgggcagcgtcagcacaacctgaccgcgagcctccagcggtatgccggatgctaaccgctggccgagcgtccgggccggcgccgcgagtcgcccctcgcgcaccacaacgtcgttcagaccgtgcagccaggcccggccgcgcaggccggaggggtcgttaaacgcgatatgccagccgggaagccacgacgaaaagccaaactcccagcgtaaatgggcgatgtcaaaaccgcgccagctggcctgacgggcttctccttgccacagggtgcccgtggtttcgccgagccgcgcgccgtccggtagagccagagtgagcagccgcgccggcgcgctaaacagcagccagaagagatagaccgccgccagcagcagggcgatagtgagtttatttttcatcgctgcgctccagcaccagcgtattaatcgtcacccaaccgggctgctgcgccacggcggtcaccgccagggtggcggtagtcatccccgcctgccccagcgcgcccagccatgccatcagcgtctggaaatcggcgggctgcacggtaaggctcaggcgggagccctgcggctgcaggcgaacgatagtgataccgtggcggccggcttcgcgcataatcaccgttgagggttcttccggagcggcagaaggtttccgctggttaagctgctggagaagcggggtctgctggcgcatccaccgcaggctggactgctccctggccagcgtttgccgccactgcgcctcgcgattttgccagggctgccagagggcgtaataaatcaggccaataagcagcatgacgcccatccccagcagcagatgccgttcgcggcgcgtacgctgttgccataaggcgagcaggttatccatcgttgccctccaacgtcagacgcccttcaataccgtcggcgcgcggcttcatctcgccggtctgcacgcgaaaccccgcccgcgcccgctggctgaactgcgccagggcctgcgatgaaacggcggatatctccagctgcagcgcgttgcgcgcggcgtcaaagctcagggcgcgcagacgaatgcccggcgtttcggcgatgatttgctgcagggcgccgagccgtgagatgagcgccggccgggcgctcacgctttccagacggcgcagatgctgctgcatttgcaggcgtggattgacgagatttttttccgctttgaaccactggcggtaaaaatcacggctggcctgcacggcggcgtcggcctgacgcgccagggcgagatggtcgtggaggcgatttccgctccacagcagcagtagcgccagggttgcgacaatcgtcggccgccagcgtcggggcgtcggcggccggcgtttcgcggcaaaattgccctggcgtaagcagattttgcgcgcctgcgggttgcttgccgccagcgccagcaaatcctgcaccgggcgaggctgccacggcgcggcgatatccggcggcggcgagtagcaggcgatgggcgcgaggtcaggccagtgaaccagcagttcgccgagccatggggtttccaccgccataccgctgcacgtctcgcagcgaaacagccactgttcgccgcagcgtacggcgctccagccggtcgggttctgcggcagggcaagggcatccggcgtcagggccagcacgttgagtccgagcccctcgcaccaggcctgccatgcgcgcatcttctctcgcccgaccaccgccacggcacagtcgcttttatcccggtggatcagggcaaaatggctctcttcgatctccgttgccagctgttcttcgagtaaaaacgccagcgcctgctgcgcatttcggcgcgcgccggcgggcagggtaacgcgatgaaacgcgcagtcgctggcgggcaccagcacccaggccggatgacgctgcgccagcaggctgagcgtcgggtcgccagcgtcaggatgccactcgccagtctgcgccgcgtcgcccggcgcggccagccgccatatcgccgtcgcggcatcgggattgaggcgaataatcagcacggcggcggaaaaagtatggtggttattcatcggctacccaatagattccgtagcgccgctggacgacgctgaaggttcgcccctgcttttgcaggagactgcgttgctgatagcgggcgctgcccatcaccacgctgaaggtggcgataaagcgctcgctgtgcaccgccagccacggacgcgcggcggcggtatcggttttttgtaatagcggctgcgacaggaaggcggcgacgctgctccagccggtggtcgcgcgggcctgcagcagctgccgggcttcgacgagggtgagttcagcggggaagagcgccgccagcagcgcggcctgagcgggctgcagggtattgacgtttacctgcagcgtctcgtccgccagggcgcagacgtagggcagcagacgctgatagagcgcggcgtccatcccggccagcagacgcagttcgctgacgtcctgcagcggctgattgccggtcagatagccgggggattgcgccatatagacttcgtcttccgcgccgttcagcagcgcctggcgatcgctatccacccagtcgcgcagggcggcggtcagctgtaaggcgcgcagcggctcgctgccgaggttctccagcagtcgggtaaaaacctgcgcgggataagggatttcaacgctttcgtcgccgctgagctggttaatggcgttgaggttgaagcaggcctgagcgtcggtaatcgtggcgtagatctcgccatcattgaccgcaaagcggcgcccctgctgggcccagttctgcgccagatgggtctggttcggcgagtcgagcgcgtcgcgttgcagcagcgccgccgccagggtttccgcccccagcgcgtaccatttagcctgcaggttatcgagggtagtggcggtttgctgatacatccgcgcgctgcgttcggtcatggcgctcgccagcaccatcatcagagcgaggatcagcagcaccataagcagggcgacgccgcgctggcgggtattcattggctgcctcccgacgtaagcagaaacagccggcggatctcgccggactgctccagcgtcagggtgacttccagcccctgcggcagcgtctgcgtctgctgccattcatcctgccagcggccgctggcgtaaaagcgcaggcgaaacgcctggacgccgcgctgcataacggtcaccgtgggcagactaccgggcagcgggtcctgctggtcgtagctcagacgctccagccgatccccgcgcaggcggtagccgacgttctgaatttccgagcgcggcaggatccccaaaggattgggccagccgttgcggctaaaggcgatcgcccagtcgtcgctgccgagctgaaaacgtccggcaaaaaagaggctcgcgctgtcgcggctgcggcggggaatgatttggctaaagtccgccgccatctggctgaacgtgagctgtaacgcctgcatgcgcccgcccttatcgcgggtgagcgtatcggcgcgcatcacgttttgcagcaccgtgaccgcagcgacgctgagcgcggcgaggattgccagcgccagcagcatttcgacgagggtaaatccgcgagcgcgctggatcatggcggcgtcacgtaggtgcgcagcgaagagacgggcattttatcgcttttggcgcagcggacttcaacgtccagcgcccgcagctgcggcaggtcggtctccaccccctgccagcgaatgtgccagctgacgcccgccgcctgcaccgtggtttccgaccagctcagcgcgggccagcgattttccagccgtagctgcaccagctgattatccgccagccaaccggccagggttttctcttccatacgacccagctggcgggtttgctggagcgtggcctgcatcaccgccagcccggcgagggcgaagaccgccagggcgaccatcacttcaatcagcgtcataccggcctgctttttcatggcgtctcctgcggttcgggcaggctttcgccgcgcgcattaaacgcgatacccggtccctcgccgacggtcagccggaacggcgtcatctcaccgccgggaaagatcagcacatcgggattgtcgcccggcgtccaggcctcgccctgcggaaaagtgagatgcagcgtgttcccggcgacgctgcccgaggtggcgacgcgtccggtgcgcagggggagccagcgatagccgttccagtcgtcgccggccgggggcggttcgttgctttcgcggggctgtaagaccagaaactgccagcgatcgggatgcaccgaggcgccaaaaaactggccggtttgcagccctcgctgctggacaaagcgcagctgcgcctcaaagcgtgccagcgcctgcgccgagctatcgtcgcgcgaggcggggaaggccagcatcaccatgcccgcgctgacgccgatcagcagcaaaatgagcatcatctccagcaacgtaaagccgcgctgtcgcactatttcttcccgatcgtccagttgccgatatcgtcattgctctccggtacgccgtccggcccgaggctgaaaatatccacctgtccgtgctggccggggctcagcagctggtaatcgctgccccacggatcctgcggcagacggcgaatatagccgccttcaggatagttgcgcgcgtgcggctcggccgatggcgcgctgaccagtgcctgcagcccctgctcggtggtgggatagcggctgttatccagtttgtacatgtccagcgccccctcgagcgccacaagatcgctgaccactttttgccggtcggccttttccttgttgcccatcaggttgggcaccacgaggctggcgagcacgccgaggatgacaatcaccaccatgatttccagtaaggtgaatccacgctgtcgttgcatatttttctccattagaacaattacatactcatcagggtattgagctgcagtatcggttgcaggatggcgaggacgataaacagcaccatgccggccatcgccaccaccagcagaggttcaaacaggctgagggccagctgaatttgcgcgctcagatcccggtcctggttatccgccgcgcgctccagcatgccgttgagctcgccgctctgttcgccgctggcgaccatgtagcgcatcatcggcgggaacagctgggtcatttcgagcgcgcgatgcaggctgacgccttcgcgaaccgcgtcgctggcggcttccagctggcgcttcgcccaggcgttgcttaatacttccgcgctgatgcgcatcgccagcagcagcggaacggcgctggcgttgagaatgctcagggtgcgggcgtagcgggcgctgttaacgctgcgcgcgacccggccaatcagcggcaggcgcagcagcagcctgtgccaggccagccgctttgccggctgctgcagcaggtagcgcagcagcagagcgatgagcatggcggccagcagcagccacggaccggcggcgcgcagcacatcgctcatcgccatcagcaggcgggtggaaaacggcagcgcctgcttaaggtggataaactgctcgacaaccttcggcaccaccgtcgacagcagaatgacgatcacgctgaccgccaccagggtcagcacgatggggtaaatcatcgcctgcagcagccgggcgcgcagctgctggcgctgttcggtatagtccgccagccggttcagcacgccgtcgaggtggccggaggcttctccggcggcgaccatcgcgcagtagagcgcgtcgaagcagcccgggtagccgcgcatcgcttccgccagcgaatggccttccagcactttgccgcgcacgccggcaatcagggttttcagctggtttttttcacactgctgggcgaccgcgtcgagcgctttttccagcgggatggcggcggcgaccagcgtcgcaagctggcgggtcaggagggcgagatcgcgggcgttggtgcggcggataaagcgcggttgcccgccgctgccggctgccggggtgatgtccagcgccagccagcccttttcccgcagcagctggcgagcgtggcgggcggagtccgcctgctggacgccgcgccgggttttaccgttttcatcaacggcctgatagcgaaaaagcgccatgtcaggaggcctccgcgatctgctgttcgctaacccgcagcacctcttgccagctggtgatccccgccagcgccttgtcccgtccggcgtggcgcagggtgatatagtccgcccccagctgctggatcagcgtcacctcgttttcgccgcggtggattgccatacgcacgcgatcgtccaccagcagcagttcgtgaatgccggtacgtccgcgatagccggtaaagccgcactcggcgcagcctcggggctgccagagcgccgtgccgggagcgatctccatctggcgggcggtgtcggcattggccggttcctgctggcgacagtgcgggcagagccggcgcaccagccgctgcgacatcaccgccagcagcgaggtggagagcagaaaaggctccacgcccatatcctgcaggcgcgagatggcgcccagcgcgctgttggtgtgcagcgttgagagcaccagatgaccggttagcgaagcctgaacggcgatttgcgccgtttcgccgtcgcgaatttcgcctaccagcaccacgtcagggtcctggcgcaaaatagcgcgcagcccgcgggcaaaggtcatatcgactttcgcgttaacctgggtctgaccgatgccctccagctcatattcgataggatcttcaatggtcatgatgttgcgctcgcgggcatcgaggcggctcagcgcggcgtagagggtggtgctttttcccgaaccggtcggcccggtcaccagcacgatgccgtgcgggcgggcgatcagtccatccacctgctgaagcagcgcgggcgacatgccgagggtcagcaggtcgagattgacgctgtttttatcgagcagacgcagcaccacgcgttcgccgtagctcgacggcagggtggagacgcgcacgtcgacggcgcgtccgccaatgcgcagcgccatgcgaccgtcctgaggaatgcgcttttcggcgatatcaaggctcgccatcaccttaatgcgcgagatcagcagcgcggcgaggcggcgctgggggcgcaggatttcgcgcagtacgccgtcgacgcgaaagcgaatttgcaggtggcgttcataggtttcgatatgaatatccgacgctttctctttgatagcctcggtgagcatggcgttaatcaggcggataatcggcgcgtcgtcttcgctatccagcaggtcgtcggtgtccggcagttcttcggcaagggtgtacagatccagctcgttgccgatatccgccatcatgcgccgggcctcggcggagtcgcgctgatagctcagcaccagcagcttttcgaacgcctccgcttccagtcgctcgaggctgaacggcatcccggccaccctgcgggcttccagcagcgcctgcggcgcggtggcggcgaggcagaaaacctcgcagctttcgccgttgctcaggagcatcacgttgtgcgcgcgggcgtagccgaaggggagcagcgggcgtcgtccagcggcgggggtcatagattgcctcccagattgaaggcgtcgatggcggcgctgacctggcggaacgcggcggtatcctggcgcgggtagatctccagcagatcgttactcagcatcgcgtcgttgttctctttgccgcgctgtttgctctgggcgtcgttaaacgcggtgtactgcccggatgaagcctgacggtactcgtcgcggtcgcggatcaccgtcgggcggataaacagcatcaggttgcgcttggagacctttttgctggtggagcggaacagcgcgccaatcaccgggatatcgccgagcagagggactttgtcggcggtgtcggagacgcttttatccagcagtccgccgacgaccaccgtttcgccgctgccgaccagcacggcgttattaaccgtacgggtattgaaggtcgcgccgagatccgagctggtgctggaggcggcgtccgccacgctggagacctcctgttcgatctccagcagaaccgaatcgccttcattgatctgcggcttcacttttagcttgatgccgacggttttgcgctcgacggtattgaagatgttatcgccggaggtggtttgcgagccggtcagcaccgggacctcctggccgacgttaaaggtggcttccatgttgtcgagggtgacgatactcggcgtcgcgagaatatcgttcttggtgctgctggagagggcggttaacagcatcgcccagttgccctggtagaacccggcggcaatgccgttgaaggagcttaaggcgcttgccagcgagctgctgacggtgccgtctttgttgtactggttggccccggcgatggccgtggatatcggcagaccgctgttggtgaactgggtcatcccggcatttttattggcccactggatgccgaggttcagaccgtcagcgtcctgcacttcggcgataatcgcttcgaccagcacctgcgggcggcggatatccagctgggcgatcacccgttccagatcgttcattacgtccggggcggcggtgacaatcagggcgttggtctgaccgtgcgctttgataatgatatttttatccagcgccgccaccggcttcgcggcctgcttttcgctctgcatcgtgctgctgatgccggtcagcacttccaccaggtcggaggctttggcgtatttcaggtagatcactttggtattgccctgggtcgcctgctggcggtcgagctgcttaatcatggcgatgatccgctggcgggagttcggctcgccgctgaccagcaccgcgttggtgcgttcatcggccaccacgttggcgaccattgagccgggcagcgccgatttgctggtgtctttgttgagttcggtcaccagcttgaccacatcggcggcggaggcccaggcgaggggaacagtcaccacgctgcggtctccggcgttatcgacgcgttcgacgatggttagcaggcgcttgatgaccgccgcgcggccggtcatcagcaggacgttggagggttcatagtgcaccacgctgcccgcgccggcgttatcgttaagctggcgcagcagcggcgccagatcgcgggccgcgacgttggtcaggggcactacgcgggtgacgacctcatcgccaatgcccggcgcggcatcgctcgccaccggcaccgcggcggttttcgcatccttcgaacgaacgactttcaggacgccgttattcatattaatcaccgcgaagccatagacatcgaggacgctgaggaagaattgataatattgctcttcgttgagcatatcgtagctgcgcacggtaatggtgccgcgtacgctgggatcgataatgaccgttttattcaggtttttactcaccgtattgataaattcctgaatatcggtgcccttaaagctggcggaaaactcttccgccgcggccggtttgaataacagcgcggcgaataccagcagcatcagggaaaatgggcgaatgacgttggcgatgatcaattattcatccctcagggctagataaatatcttgtttctggccgtcgcgttcaacggtaagagttatttcagttaattccggtagctgggctaatgcctggcgggactgttctttatcgcggagatccaggccgttcagggctatcgccagatcgttttctttgagacccgcctggcgaaatagcgccgggtctttgcccggattcagacgatatccgctgagcttgtcgttaaccatgaccggcgaaatattgaggtaatgaagaatattttgcggctgctcgcggagttcctgcgccaattggcgggctggcggcgcggcgctatttttgccggcggcgggcgggtcgttaaacagcgggatagcctcatttctgccgcggtaattaacaatcaggcggtcggggaaaatggcgacgattttcgcctctccgcccggcgtgctatcgccaatcccgaggctaacctgttgattccctttcatcatgatggcaatggcgcgagagggatcggtgctggcgagcaggccggtaacgcgcagtttgagcgccgatacgggcgcctggtcgaggttgccgccgtgcgcggaggcggaggttttctccgcaaggccaaacagcgtaaagcgcggcagcgccgtttccggggagggcgcggcgggcgccgtcatatcggcagggctcaaggcgttatccgtaaagtttaccgggagaattattttccaggttaattgggcgagctgctggcagataaaaaataatatgatggacgtcacaatatgaggcgcgtaattaattatttttttatttgatattgttaatctcatcacggaattatgcatttttattcctttgctcattctatttccctcagcaaaaggtaccgccctaccgatattggtggggcattttttattgtgagcgtgcttattgcgggaatctgcgtaggtcgctgcgaatcataaagagtttggctattgtggtcgtcattccctttttattttttctcctccggccgcctacgcccccacgtaatgagcgaatggatgattgaaccggagagagcaagaatatctaattatcggcgctttaaagatatgctcgttatttttttatggtgcttaagtgcgccaggaatagtttcgcgtatataacacttcatataatttaatcagcatgtatagggactatcgaatgctcagatatacccgtaatgccctggttctgggatcgctggttttacttagcggttgcgataacggatcctcttcttcttcctctggaaatcccgatactcctggtaatcaggatgtggttgtacgtttacctgacgttgccgtacccggcgaagcggccacggcgacagaaaagcaggcggtcattcacctggtggatatcgccggcatcaccagcagtagcgctgcggactacagcagtaaaaacctctacttatggaacaacgaaacttgcgacgcgctgagcgcgccggtagcggactggaatgacgtcagcaccacgccgagcggcagcgataaatatggcccgtactgggtgatcccgctcaacaaagagagcggctgtattaacgttatcgttcgcgacggcaccgataagctgatcgatagcgacctgcgggtgtcgtttggcgactttaccgatcgtacggtatcggtgatcgccggcaacagcgcggtctatgactcccgcgccgacgccttccgcgccgcttttggcgtcgcgctggccgaagcccactgggtcgataaaaatacgctgctgtggccgggcgggcaggataagcccctcgtgcgcctctactacagccacagcagtaaagtggcggccgacggcgaaggcaaatttaccgaccgctacctgaaactgacgccgactaccgtcagccagcaggtcagcatgcgcttcccgcatctttccagctatgcggcctttaagctgccggacaacgccaacgttgacgagctgctgcagggcgaaacggtcgccattgctgccgcagaggacgggatcctgatttccgctacccaggtacagacggcgggcgtgctggatgatacctatgccgaagcggcggaagccctgagctacggcgcgcagctggccgacggcggcgtcaccttccgcgtctgggcgccgaccgctcagcaagtggatgtggtggtctacagcgcggacaaaaaagtgattggcagccatccgatgacccgcgacagcgcttccggcgcgtggtcgtggcagggcggtagcgatctgaaaggcgcgttctaccgctatgcgatgacggtttatcatccgcagtcgcgcaaggttgaacagtacgaagtcaccgatccgtatgcgcatagcctgtcgaccaactcggagtacagccaggtggtcgatctcaacgacagcgccctgaagcctgacggctgggatagcctgacgatgccgcatgcccagaagacaaaagcggatttagcgaagatgacgattcatgaatcgcatattcgcgatctctccgcctgggaccagaccgttccggccgaactgcgcggtaaataccttgcgctgaccgccggcgacagcaatatggtgcagcatctgaagaagctctccgcttcaggcgtcacgcacgtcgaactgctgccggtcttcgatctggcgacggtgaacgagttcagcgacaaagtcgccgatattcagcagccgttcagccgcctgtgcgaagtgaacagcgcggtgaaaagcagcgagttcgccggatactgcgacagcgcttccaccgtggaagaggtgctgaatcagcttaagcagagcgatagccaggataatcctcaggtgcaggcgctgaatacgctggtggcgcagaccgactcctacaactggggctacgatccgttccactacacggttccggaaggatcctacgcgaccgatccggaaggcacgacgcgcatcaaagagttccgcaccatgattcaggcgatcaagcaggatctggggatgaacgtcattatggacgtggtatacaaccacaccaacgccgcgggcccgaccgaccgcacgtcggtgctggataagatcgtaccctggtactatcagcgtctgaatgaaattaccggcagcgttgaatccgccacctgctgttccgactctgcgccggagcatcggatgttcgccaagctgatcgccgactcgctggcggtgtggaccacggactataaaatcgatggcttccgcttcgatctgatgggctatcacccgaaagcgcaaattctctcggcgtgggagcgcattaaggccctgaacccggatatctacttcttcggcgaaggctgggactcgaaccagagcgaccgctttgaaatcgcctcgcagatcaacctgaaaggtaccggcatcggcacgttctccgatcgcctgcgcgactccgtgcgcggcggcggcccgttcgattccggcgatgcgctgcgtcagaaccagggcgtcggcagcggcgcgggcgtgttgccaaacgaactcgccagcctgagcgatgaccaggtgcgtcatctggccgatctgacccgtctgggcatggccggtaacctcgctgactttgtgatgatcgacaaagacggtgcggtgaagaaaggcagcgaaattgactataacggcgcgcctggcggctatgccgcagacccgacggaagtcgtcaactatgtttcgaagcacgacaaccagacgctgtgggacatgatcagctataaagcgtcccaggaagccgacctggcgacccgcgttcgcatgcaggccgtttcgctggcgacggtgatgctcgggcaggggatcgctttcgaccagcaaggttctgaactgctgcgctcgaaatcctttacccgcgactcctacgactccggcgactggttcaaccgcgtggattattccctgcaggataacaactacaacgttgggatgccgcgcatcagcgatgacggcagcaactatgacgtgattactcgcgtcaaagagatggttgccactccgggcgaagcggagctgaagcagatgaccgcgttctaccaggagctgaccgagctgcgtaaatcctccccgctgttcaccttaggcgacggcagcgcggtgatgaagcgcgttgatttccgtaataccggttcagaccagcaggccggtctgctgattatgaccgtggatgacggagtgaaagcgggcgccagcctggatagccgtcttgacggcctggtggtggtgattaacgccgcgccggaaagccgtacgctgaatgagtttgccggtgaaacgctgcagctgagcgcgatccagcaggcggcgggcgaaaattcgctggcaaacggcgtgcagattgccgctgacggcacggtcacgctgccggcatggtcggtggcggtgctggaaatgccgcagggcgatgcccagggcgccgggctgccggtcagcagcaagtaagacctgaacctcccggcccgcggcgtcataaccacgggccgggatggcgtgtcttgattaaggagaagcccgtgcttgttcgtcagcaagagccgtacccgcagtccgcgcccccgacggtagttggaaaaatggtgcagatcccctatgtgaccgtaccgctgtacgccgcgctgctgattgcgctcggctggttcggcggcgagcagtggcggaataagcccgagccgcagccgataaggcagccggtagcgcatgcggcgttagtgccgctgaatcaaccggcggtcaaaactgccgtgacggcggttaaagccgagccagaaatgaaggctgaaccagaaatagcgatcgatgaagatactctgccgcctctgcgctatagcgcgcacgtctacgcctcgctggcggagaaacgcagcattgtattaaacggacagtcctggaaggagggcgactcgccgctgccgaacctggttattgagcagattcagcaggatctcaccgtatttagcttcaacggtaaaacgtttaccctcgcggcgctggatgactggccgggcggggcgattgaggagagtccgcaggctgaataaaatagtgcgagcggaataaaaataagcgctatttattgccgcgcaggctatcaataaatggcgcaagttggcgattaaactggctgcattttgtggcttccggggtactgtcctgctggagctgttgatatagctgcgcgctgcgctggcttagcacattatcgtcaatattcgcccatccgcgttttttacccacgtttattgccgcacgattaatcgcttcatcggcgggcagatcgctgcggttgcatttattcttcagatagcgcgccccggcggcgacggaggcgagctgctcaagctgggcctgaccgctcacggcaggactgagggttgtcgaacgattttgctgacagcctgagagcagggcgaccgccataagcgggaatagaataaagttgcgcataatatattaatcggaaaaattaattggctgacagtttagcaaatatttgtccgcagtcatcagaaaatctgccaaattatcaatgttaagcggctcgcttttttatcattgtcgtcttttaaatttgtttttctttcacctgcatgatttttcttttatggcagaaatactattttccggcgttgccgttccgctttcttttggcggcatgtagaaggatacggacggacatgtttatgttgttaaaaaacataataatttcccttttgttacctgatgagcatgtaaaatgctggttaagaatgtcgcggtttagtgctatcctgtatcgcctggacaacaagtaccgtgtcccgaactattctgtcgatgaagccggtaacaatgtgatttgtatggtgaatttttaaagtgaaaatcatgcgagcgacatgataacgcgtcgcgcagttcataaatggtcgcctgaaagccaaaacggtcgggcgtcaatttgagagatttcttctttcccccaatcggggaaacattgagaatcaggcctttacgcctgtaagttgcggagaaaaagcatggcgggagatgaccgcgagccgatcggacgtaaggggagaccctcgcgcccggcaaaacaaaaggtaactcgccgtcgggtccgggaagaggactacgacgacgattacgatgatgactatgaggatgaaaaaccgatgccgcggaaaggaaaaggcaaaggcggtaaaccccctcgtcgtaaacgcgcctggctatggctgctgattaagattggggtcgtctgcgcggtgttgattgccgcctatggcgtctacctcgatcagaaaatccgcagccgcatcgacggtaaagtctgggatctgcccgcggcggtttatggccggatggtcaaccttgagccggatatgcagatcagcaaaaacgaaatggtgcgcctgctcaacgccacgcagtatcgccaggtgagcgcgatgacgcgcccgggcgaatacacggtacaggccaacagtatcgagatgatccgccgtccgttcgatttcccggacagtaaagaagggcaggtgcgcgcgcgtctgacctttaatggcgatcgtctggacactatcgagaatatggataacaaccgccagttcggtttcttccgtctcgatccgcgcctgatcaccatgctgcaatcggccaacggcgaacagcgtctgtttgttaagcgcaacggcttcccggatctgctggtcgataccctgctggcgacggaagaccgccatttctacgaacacgacggcatcagcctctactcgattggccgcgcggtgctggcgaacctgaccgccgggcgtacggtgcagggcgcgagtacgctgacccagcagctggtgaagaacctgttcctctccagcgaacgttcgtactggcgtaagattaatgaagcctatatggcgctgatcgtcgatgcccgctacagcaaggatcgtatccttgagctgtatatgaacgaagtgtacctcggtcagagcggcgataacgagatccgcggcttcccgctggcgagcctctattactttggtcgtccggtggaagagctgagcctcgatcagcaggcgctgctggtggggatggtaaaaggcgcgtcggtctacaacccgtggcgtaacccgaagctggcgctggagcgacgcaatctcgtgctgcgtctgctgcagcagcagcaggttatcgatcaggaactgtatgacatgctgagcgcgcgtccgctgggcgtacagccgcgcggcggggtgatctctccgcagccggcgtttatgcagatggtacgccaggagctgcaggcgaagctgggcgacaaagtgaaagatctctccggcgtgaagatctttaccaccttcgactcggtcgcgcaggacgcggcggaaaaagcggcgacggaaggtattccggcgctgaagaaacagcgtaagctgccggatctggaaaccgcgatggtggtggtcgaccgcttcaccggcgaggtgcgggcgatggtcggcggcgcggagccgcagtttgccggctataaccgcgcgatgcaggcgcgtcgttcaattggttcactggcaaaaccggcgacctatctgaccgcgctaagccagccgaaccagtatcgtctcaatacctggattgccgatgcgcctatctcgattcgcctgtctaatggccagacatggtcgccgcagaacgacgatcgtcgctacagcgatagcggtaaagtgatgctggttgacgcgctgacgcgttcaatgaacgtgccgacggtgaaccttgggatggcgctgggtctgccggcggtggtcgatacctggactaagctgggcgcgccgaagaatcagctgaacgccgtgccgtctatgctgctgggggcgctgaacctgacgccgattgaagtggcgcaggcgttccagaccattgccagcgggggtaaccgcgcaccgctgtccgcgctgcgttccgttatcgctgaagatggtaccgtgctctatcagagctatccgcaggcggaacgcgcggtgccggcgcaggcggcgtatatgacgctatggaccatgcagcaggtggtgcagcgcggtaccggtcgccagctgggcgcgaagtatccgggcctgcatctggcgggtaaaaccgggaccaccaacaacaacgttgatacctggtttgccggtattgacggcggtcaggtgaccattacctgggtgggtcgcgataataaccagccgaccaagctgtacggcgccagcggcgcgatgtcaatttatcagcgctacctggctaaccagacgccgacgccgctggtgctgactccgcctgaagacgtggtggatatgggcgtcgatggcagcggtaactttgtctgcagcggcggcatgcgctcgctgccggtatggacgacctcgccggacgcgctgtgccgccagggcgaacagatccaacagcagcagcttgagcagcagcaggcgaataacccgttcaatcagtccgggcagcagccgcagcagcaaaatcagcagcagcaaccgccgaagcaggagaagagcgatggcgtagcgggctggattaaggatatgttcggcagcaattaacccgccgttgcatcctgtaaaccggcgctttgtcggttgaatggaggcggaaatataggccctctactactccggtagtagagggcctttttatctctgtcatttaattaacagccgtttaaccccacacttaccgtctggttatttattcatcctttgatcgctcacagggggcatatttcttgccttgccgcgcgcgtttcgcctattatgtcactcgttataataataattctcgtttacgttatcattcacttctattagagatatacccatggcgcgtcttaaaactgctcagccaaatcactcgctgcgtaaaatcgcagttgtagtagccacggcggttagcggcatgtctgtttatgcacaggcggcagttgaaccgaaagaagaaaccattaccgtcaccgccgctccggccccgcaggagagcgcctggggaccggcagcgaccatcgcggcgaaacattcggctaccgcaacaaaaaccgatacccccatcgaaaaaacgccgcagtctatttccgtggtgacccgtcaggaaatggagatgaagcagccgacgacggtgaaagaagcgctggcctatacgccgggcgtattctcgactcgcggcagctcaaccacctatgatgtggtgacgattcgtggtttcaccacgtcgacaacggtgaataccaaccagtatctggatgggatgaagctgcagggtaataactattccgaagtatcgatggacccttatttcctcgaacgtgttgaggtgatgcgcgggccaacgtcggtgctgtacggcaacagcaaccctggcggtatcgtcagcatggtcagcaagcgtccgaccactgagccgctgaaagaaatccagtttaaaatgggcaccgataatctgtggcagacgggatttgatttcagcgacgccattgatgatgacggcgtgtggtcatatcgtctgaccggtttgggccgcagccaggacgcccagcagcaaatggcgaagtctacccgttacgcggtcgccccctcctttagctggcgtccggatgacaaaacggacttcactttcctgagtaatttccagagcgatccgtatgccggatattacggctggctgccgcgtgaagggacggtggtgccgtattacgacgccaacggtaaggcgcataagctgccgacggactttaacgaaggcgaggcggataataagatgtcccgccgtcagcagatggtgggctacagcttctcgcatcagtttgatgatactttcgccgtacgtcagaacctgcgttatgccaacgtccataccctctaccgttcggtctacggcaacggatatacgccgacaggcaaaatcaaccgtgcgtatgttcgctctgatgagaaccttaatacgtttaccgttgatactcagctgcagtctgatttcgctaccggcgcggtagggcatactctgttaaccggcgtggattattcgcgcatgcgcaatgatgtgaacgccgattacgggacggcttccgcgcttgacatgcagaacccgcagtacggcaatgcaaacgtgagcgttaacttcccctattcagtgctgaaccgtatggagcagaccggtctctatgcccaggatcagatggcgtgggataagtgggtgatgacgctggggggccgctacgactatgcgatggcttcaaccctgacgcgccctgcgaataccctcgccaaaaatcacgatcagcagttcacctggcgcggcggtattaactatctgtttgataatggtatctcgccatacttcagctacagccagtcttttgagccggtttccggatcgtcgcgggatggtaaacccttcgatgcttcccacggcgaacagtatgaagccggggtgaagtacgtaccgaaggatatgccggtcgtgctgaccgccgcggtatatcagctgaccaaagataaaaacctgacggcggatccgaacaacgcctcgttcagcatccagacgggcgaaatccgctctcgcgggattgagctggaggcgaaggcggcggttaacgccaacgtcaacgtgacggcttcctatacctataccgacgctcaataccagcatgacaccacctttaacggcaagcgtccggcggaagtgccgcgcaacatggcgtcgctgtgggcggactacaccttccacgaaaccgcgctgagcggcctgacggtgggtgccggggcgcgctatgtcggttcaacggtaagctattacaaaaacgatacttcgacggggaaaaaagatgacgtcttcaacgtcgcgggctacgcgttaatggatgccaccgtgaaatatgatttagcgcgctttggtctgccgggttcgtcgatcggggtcaacgtcaacaacctgttcgatcgcgaatacgtttccagctgctatagcgagtacgcatgctactggggcgctgagcgccaggttgtggcgaccgcgactttccgtttctaaccacttaacgggcgcggttcgccgcgcctctgaccaggttccgttatgcaggaaatcactccgcactccgatacgacgttttcactggaccgcgtgaccttccgcgtgcccggccgaacgctgctgcatcctctgtcgttaaccttcccggcgggaaaagtcacgggcctgattggccataacggctccggcaaatcgacgctgctgaaaatgcttggccgccatcaggcgccctcggacggggaggttttgctcgacggtcagccgctcgacagctggggcagtaaagcctttgcccgcaaagtggcttatctgccgcagcagctgccgccggcggaaggcatgacggtgcgtgagctggtggcgatcggccgctacccgtggcacggagcgctggggcgttttggcgcggcggatcgggagaaagtggaagaggcgattgcgctggtcgggctaaaaccgctggcccaccggctggtggacagcctctccggcggcgaacgccagcgcgcgtggattgccatgctggtggctcaggatagccgctgcctgctgctcgatgaacctacctcggcgctggatatcgcccaccaggtggatgtgctggcgctggtccatcgcctcagccagcagcgcgggctgacggtgatcgccgtactgcatgatatcaatatggcggcgcgctactgcgactatctggttgcgctgcgcggcggtgagatgatcgctcagggaacgcccgcggagctgatgcgcagcgaaaccctggaacaaatttacggcatcccgatggggatcctgccgcatccggctggcgcagcgccggtaagttttgtctattgatggaaaacctcacattcatcacgcggcggcgcctgctgaccgcaatggcgctgtcgccgctgctgtggcagatgcgcggcgcgcgggcggcggaagtggatccgcagcgtattgtcgcgctcgaatggctgccggtagagctgctgctggcgctgggcgttacgccctacggcgttgccgatatccctaactaccggctgtgggtcaatgaaccggcgctacctgattcggtgattgacgtcgggctgcgtaccgagcccaatctggagctgctgacgcagatgaagccgtcgtttctggtctggtcggcggggtacggcccgtcggcggaaaagctggcgcgtattgcgcccggacgaggattcaccttcagcgacggcaagcgcccgctgatgatggctcagcagtcgcttggcgaaatggctgatctgatcggcagacagcgggaagcgaagcgccatctggcggaatttgacgcgctgatggagagcctgcgaccgcgctttgcccgccgcggcgatcgtccgctgctgatgattactctgcttgatagccgtcacgtgctggtttttgcgcaaaactgcctgttccaggaggtgctcgaccgctttgccatcaaaaatgcctggcagggcgaaaccaccttctggggcagcgtcaccgtcggtattgaccggctggcggcctacagagacgccgacgttatctgcttcgatcacggcaatgcgcgggagatggcgcagcttatggcgacaccgctgtggcgagcgatgccgtttgttcgcgcagggcgttttcagcgcgtcccggcggtgtggttctatggcgcgacgctatcggcgatgcattttgcccgcgtgctggccgacgctcagggaggcccggcatgagatcgcgaatttcgcctttggcgacatcactgctgttgacgctccttctcgtcgctgctgcgctgacgctgttcaacctcaacgtggcgctgccgcgaagcgaatgggggcaggcgctgtggcagccgaatatcgataatatcgctcagatgctgttccactacagcctgctgccgcggctggcgatatcgctgctggtcggcgccgggctggggctggtgggcgtgctgttccagcaggtgctacgtaacccgctggcggagccgacgacgctcggcgtggcgaccggggcgcagctgggcatgacggtcaccacgctgtgggcgattcctggcgtgctggcgtcgcagttcgccgcgctggccggggcgtgcattgtcggcgcgctggtgtttggcgtgtcgtggggcaaacgcctctcgccggtgacgttgattctggcagggctggtggtgagcctgtactgcggcgcgcttaatcaactaatggctattttccatcacgatcggctgcaaagtatgttcctgtggagtaccggtaccctgacgcagaccgactggagcgtggtgcagcggctgtggccgcagctgctgggcggagcgattttaacgctgctgctgctgcgtccgctgaccctgatggggctggacgacggcgtggcgcgcaacctcggactggcgctctcgctggcgcggctgggggcgttgaccctggcgattatcattagcgccctgttggtgaatgcggtggggattattggctttatcggcctgttcgcgccgctgctggcgaagatgctgggcgcgcgtcgcctgctctcgcgcctgctgctggcggccctgattggcgcgctgctgctgtggctctccgatcaggttatcctctggctggcccgggtgtggatggagatctccaccggttcggtgaccgcgctgattggcgcgccgctgctgctatggctgctgccgcgcctgcgcagcattagcgcgccggtgatgaacggtggcgatagcgtgctggctgaacggcaacatgtgctgtggttcgcgctgggcgggctggcgattctgctgctggccatcgtcgcggcgctggctttcggccgcgacgcgcagggctggcactgggccagcggtacgctactggatgagctaatgccctggcgctggccgcgcgttctggcggcgctgttcgctggcgtgatgctggcggtagcgggctgcattatccagcgcttaaccggtaatccgatggccagtccggaagtgctcgggatcagctcgggcgcggcgtttggcgtggtggtgatgctgttcttcgtgccgggaaatgcctttggctggctgctgcccgccggtagcctcggcgcggcggcgacgctgctggtcattctgattgccgccggacgcggcgggttctcgccgcatcgcatgctgctggcggggatggcgctgagcacggcgtttaccatgctgctgatgatgctgcaggccagcggcgatccgcgaatggcgcagatcctgacgtggatttccggctcaacctacagcgccacgccggagctcgtgatgcgcagcggcgcggtgatgcttattctgctggcgctgactccgctttgccgacgctggttgacgattctgccgctgggcggcgaggcggcgagggcggtcgggatggcgctgacgccgtcacgtatcgggctgctgctgctggcggcatgtctgaccgcggccgcaaccctaacgattggcccgctcagcttcgtggggctaatggcgccgcatattgcgcgtatgatgggattccggcgtacgatgccgcatatggcgatctccggcctgattggcggagtgctgctggtgttcgccgactggtgcggccggatgctgatgttcccctaccaaatcccggcaggattgctgtcgacgtttatcggcgcgccgtactttatctatctgttgagaaagcagagccggtagcgtttcaccatcgcgatgcccggcgggcgtcgcgatgttatccccttttttgcccggattcagttaggactaactgcggaattctgcaactgctctaattcgttttccgtcacttccgtgagctggataaccagcgatcgctccatgccgttttccagcatccggttggcaatttttagtcgggcctttgcctcacccttttcctggccccattcaataaaaagctctttgccgtttttttccagccattcgtccagcgtttccatcgactcctcctgcggtatatgacttaccagtccattgaaaaaagccttagggttttcggtgtgaccgcgctgccccatatagctaaataacacttttagctgctcggcggtagtgtatcccgcgttaagcagaatccccaattgctcgagcagcaacatgagatcccgctggcgaatatgcttttgcaggagctccaggatcgcaatacgccgatgctgcataatcgcgttatcaggtatcaccgtgatatcgaccagcggaaaagggcggttgtagattatttttgcccactccggcaagtcgaacatactgtaccagttcattgagaaggggtagggcgaggttttgccctgataaaacaaaatgggaacaaccaacgggagatgtgtatttcccgcttccagatggcgctgcatggcggcgacgctatagcgcatgagacgaaacggcatctgcttgtccggtgagctttgatgctcaataagcacatggatatagcccgtcttattattgatttccaatgagtacagcacgtcggaatagtaagcccgcagatcttcttcaataaaactacctgattccagctgaagcgtgttgagatcgcacagcgagcgcaggtctgccggaagatggatatcaataaagtctctggcggtatcgatatgggccagtagctgtttaaaaatggcgtcatgcggtgtaggggacgattgtgttgtcattctgagcaatccttgcggctgagtttccgctgagaatctgcttttgcctgcccattgtctgccgacgattttgggttctacgaggcgggatgatgacaatctttcgaggcgatcgcgtttgcatcttgttatgcgtgggccgacgcaaaatgatgcttttaaacaagatgcgtattgccggggcaggggggccccggcgttgaggttacagcttagcgaaggcgttacgcgcggcggcgacggtgttgtcgatatcttcttcgctatgggcgatggacataaagcccgcttcaaacgccgacggcgccaggtagacgccctcttccagcatcaggtggaagaagcgtttaaaccgctcgacatcgcatttgaccacgtcctggtagcaggtcacggttggcgcgtcggtaaagaaaatgccgaacatgccgccgacgttattcaccaccagcggaataccggcatcgcgcgcggcgtccagcagaccctgggccagctggttagtgagctcggttagcgtctcgtgcacgccgggctgcgccacttcgctcaggcaagcgaaacctgccgccatcgcgatggggttgccggagagggtgcctgcctggtaaaccgggccggtcggcgccagggcatccatcacctcacgacgaccgccgaatgcgccaaccggcataccgccgccgatgattttgccaaggcaggtcagatccggcacaacgccgtagtaatcctgcgcgccggccagcgccacgcggaagccggtcatgacttcatcgataatcagcagcgcgccgaactcgtcgcacagcgcgcgcaggcccggcagaaactctggcagcggcgggatgcagttcatattaccggccaccggctcaacgatgatgcaggcgatatcctgcggatactgttcgaacgcggcgcgaaccgaggacagatcgttataggtacaggtcagggtgtgtttggcgaaatccgccggcacgcccggcgagttcggctggccgagcgtcagcgcgcctgagccggcttttaccagcaggcagtcggcgtggccgtggtagcagccttcgaacttgataattttgtcacggccggtgaagccgcgggccaggcgaatggcgctcatggtggcttcggtaccggagttcaccatgcggaccatatccatggtcgggaccagctcggtgaccagcgccgccattttaacttccatctccgtcggcgcgccaaagctcaggccgcgttcggcggcttcaaggaccgcgttgcggatggccggatggttatgacccagcaccattgggccccaggagccgacataatcgatatacgctttaccatcaacgtcgtaaaggtaagcgccgtcggcgcgctcgataaacagcggcgtaccgccgacgccggtgaacgcacgtaccggagagttcacgccgccgggaataagttcacgcgcagcgttatacagattttcagatttgctcattgccagggtcctggttcgtgaaaaatgttttgtcgactattctaagttattccaggaaggttatgaaagttttgcccaattgaaacaatggggtcgcggcgcatttttttgacgacggagcctgtccggttggctagaatgaccttctttctatttgtattacttattattgataatggcatgaaagcagaaaacccctcttcttcagcacatcagttcgtacgcgttcgccgcagcgatgccgtgcgtcggttgattcagcgtgataaaacgccgctggcggtgttattaatggcggccgttgtcggcacgctggcggggctgatcggcgtcgcgtttgaaaaaagcgtcaactgggtgcagaacctgcgcataggcgcgctggtagaggtggcagaccactggtttctggtctggccgctggcctttatcctctccgctttgctggcgatggtgggctattttctcgtccgtcgttttgcgccggaagcaggcggctccgggatcccggaaattgaaggcgcgctggaggagctgcgtcccgttcgctggtggcgcgtactgccggtgaagtttatcggcggcatggggacgctgggtgcgggcatggtgctggggcgcgaagggccgatggtgcagcttgggggcaatcttgggcgcatggtggtggacgtttttcgcatgcgcagtccggaagcgcgccatacgctgctggcgaccggcgccgcggcggggctctccgccgcctttaacgcgccgctggccgggattctgtttattattgaagagatgcgcccgcagtttcgctacaacctgatctccattaaagccgtgtttaccggcgtcattatggccaccatcgttttccgtatcttcaacggcgataaagcggttatcgaggtcggtaagctcagcaatgcgccggtcaacaccctgtggctgtatttgatcctcgggatgatttttggctgtgttggcccgctgtttaatacgctggtgctgcgcacccaggatatgttccagcggctccacggcggcaacattaaaaaatgggtgctgattggcggcctgatcggcggaagctgcggcgtgctgggtctgattcagccggcggcgtccggcggcgggtttaacctgattcccatcgccgcggcgggcaatttttccgtcggcctgctgctgtttatttttatcgcgcgggtgattaccacgctgctttgcttctcttccggcgcgcccggcggtatctttgcgccgatgctggcgctggggacgctgctgggcacggcgtttggcatggcggcgacgccgctgtttccggcctatcatctggatgccggcacctttgccatcgccgggatgggggcgctgctcgccgcctcggttcgcgcgccgttgaccggcatcgtgctggtgctggagatgaccgataactatcagctcattttgccaatgattattacctgtctcggcgcaacactattggcacaattcctcggcggtaagcctttatactcgactattctgcagcgcaccctggcaaaacaaaaggcggaacaggaagcaaaggcgcagccggtcggcggggagaatacttgaacgatttactcgggtattggataatggctcaaaaggtcgggttattctttaaccggtcagaagtatcaatgggagcataaaatgagtgatgacgtagcgttgccgctggagtttaccgaagccgcggcgattaaagtaaaagacctgattgcggatgaagacaatccgaacctgaaactgcgcgtgtacatcaccggtggtggctgcagcggtttccagtacggctttaccttcgacgatcaggttaacgaaggcgatatgactatcgagaagcagggcgtcggcctggtggttgacccaatgagcctgcagtatctggtcggcggcgccgtcgattataccgaaggtctggaaggctcgcgttttatcgtgaccaacccgaatgcgaaaagcacctgcggctgcggctcctcgttcagcgtctaaagatagtgcgcccgggagcctcttctcccccgccctctcatacagcgagagggcgcaaacgctaaaaacggtaacgttaaggttaccgttttgcttttattaccgtccattctcatcaagcgcgaacgttggcagcttcaggtgccagcggatggccgccagcctgatgaccagcgtgaccaccatacctatcatcgccgcgttttctaacggaacctgaaaggtgtagtacgccgtcgcatgcacgatgccgccaacgatgcaggccgtcgcgtagatttccgtacgcagaatcatcgggatttcacgcgccagcacgtcgcggatgatccccccgccgacgccggtgacgacgcccatgcagacggccaccagcggtccgctatgggcaagaaaggctttgttgacgccaataccgacaaataccgccagaccgacggcgtccagcaccggcagcacccatttgggtaaccggcgcggctggcgtaccagcaggatagtgaacatgctggtgaccatcgccaccaccagatcggtagggtctttaacccaaaataccgggccgttagcaagggccatatcgcgaatggtgccaccgcctaccgcggtcaccacgcctaataccagcacgccgaaagggtccatgcgcagctttccagccagcagaacgccggagatggcaaacacggcggtgccaatgatatccagccaatagacaagcatcgtcagttcccacttagagtctatcccattaggcttttttatttgccagtttggccctgggcagtgctcaccgccctcacgtaccgcgtgtacgctccgggtgttccgcgctgtccgtgtccaaactggctgcaacaattgcgcctggtgggatagcctttttgcacctggattagcaggtgattattttatctgctcgagcgcagtacagagttgttttgcggcgagaataatacgtgggctcgcgcgttcaaaccagtcgccatgtagcgcaataaaagaaatttttagctgattctgccaatagcgctcaacggcgggaagttgactggggtcgccggcgatgacaatggcctgcggctgccttgccagcacctgttcacggctcacctgcggccagggaacccggctggcggcaaaaatgttttctcccccacacagcgtcagaacctgatcctgaatcgagcctttgctggtggtaaagagagggttggcgccgaactgtaaaaaaacgcgttttttcggcccgctcgcgtagcgggtttttaaggcctggtaggcgtcctgcattttctgcgccgcctgccgcgccttttccggctgagggctccactgcgccagctggcgaagcgttgcgataatctcttcgatagtcgatgtttcgacccagatgacttttatcccgagcgagcttagctgattcacctggcgttcagcgttaccgccgcgccacgccagcaccaggtcgggcttaagggcgacgatgcgttccagattcatcccctgccagctggagacctgctctatctttgcggcttccgggggataatcggaatagctgctgacgccaaccggcgtaataccggcggcaaacgccagttcagtattggcgggagagagcgtaatcacccgcggcgcggcgaaaagccacgccggggcaagcagcatcaggacggcaagcgccgcgttgagcgacttagccacgagccaggtgctgcaccaggttttccaccatcagggtggattgcttcgcggcaacggcgagaaactcgtcgaagctcagatgcgactgctgatcggcaacatcggagatggcgcgaacgacaacaaacggtacgccatagttgtggcagacgtgcgcgatggcggtggcttccatttctaccgcgacggcctgcgggaagttgtggcggattttggcgagaccaatggaaccgttgatgaatgcatcgccgctgacaatgagtccgcgaaccgcgttaagattcagcgcgctgatgcaggtctctgcggcggcaatcagcttatcatcggctttgaaaccggcagggcagcccggtagctggccatactcatagccaaacgcggtgacgtccgcgtcgtgatagcgcgtttcgtcggagacgacgatatcgccaaccttcagggtcgacgcgaggccgcccgcagaaccggtgttaataatcacatctggcttgcagtgctccatcagcagagtggcgcccatggcggcggcgactttgccaatgcccgatttcaacaaagcgacatcaacgccctgcagctggccggtgtagatttcgctgccgccgatagtgatggtctggcggttgtcgattttgtcgcgcagaagggtaacttcttcttccattgcgccaataataccgattttcatagatttactcgcgatgtgtgggttttagcggcatagtctatcatgcgcttagaaggaaacgttattgctcgctcgggggagatcatggctaagatcgattttcgcaacaagattaactggcgtcgccgctaccgttcaccgcagggcgttgagacggagcgtgaaatcctgcgaattttcgaaagcgatcgcggacgcatcatcaactcgccggcgatccgccggctgcagcaaaaaacccaggttttcccgctggagcgcaatgccgcggtgcgtacgcggctgacccactctctggaagttcagcaggtgggccgctacatcgccaaagaggtgctgagtcgtctgaaagagcagaagctgctggaaagctacgggctggatgagcttaccgggccgttcgagagcattgttgaaatggcctgcctgatgcacgatatcggcaatccgccatttggccattttggcgaggcggcaattaatgattggttcagccagcggcttttccccggcgatgcggccagccagccgttaaccgacgatcgctgcgtggtcgcggcgctgcgcctgcaggaaggcgatagccagctgaatgagctgcggcgtaaggttcgccaggacttatgctggtttgaaggcaatgcgcagggtattcgcttagtgcatacgctgatgcgcatgaatctcacctgggcgcaggtgggctgtattctaaaatatacacgtccggcatggtggcgcggggaagcgccggccagccacaattatttaatgaaaaaacctggttattatttagccgaagagggctatgttgcgaggttgcgtaaagaactggatctggctccttacaatcgcttcccattaacgtggattatggaagccgcggatgatatctcatattgcgtcgccgaccttgaagatgcggtagaaaaacgcatcttcagcgtagagcagctttatcagcatctctatgaagcctggggcgttcacgaaaaaggctccttgtttaatcaggttgtcgaaaacgcctgggagaaatcgcgtgcgaattctctgagccggagtactgaagatcagttttttatgtatttacgggttaatacgctcaatagactggtaccgtacgcggcgcggcggtttattgataacctggcgaagatttttagcggcgattttaatcacgcgctgcttgaggacgatagcgattgcagtcagctgcttgaactatacaaaaatgttgcggtaaaacatgtgtttagccatcctgatgtcgagcagctggagctgcagggctatcgcgtgatcagcggtctgttagatatataccagccgctgttaaaattatcgctggatgagtttagtttgctggtggaaaaagagcgggtgcgaagtttaccgattgcatcacgtctttttcagaaactttcaactcgtcatcggttagcttacatagaagccgtaaataagatttcgcgcaataatccggagtttccagtgatggaatattattatcgctgtcgtctcattcaggactatatcagcggaatgaccgacttgtatgcatgggatgaatatcgacgattgatggccgtagaataagggtgagttttgtaaagacggacaataaatttttacttttaccaaaacttcattccggaacttcgcgctataaaatgactctgatagtcaccaacacagcaactattcgttatctgaaattgagattgaaacctatgaaaaaaaccacgttagcaatgagtgccctggctctgagtttaggtctggcgttgtcccctctctctgcgagcgcggcggaaacagcttcttcggcgactaatgcgcagcagatgccaagcctggcgccgatgctggaaaaagtgatgccgtcggtcgtgagcattaacgttgaggggagcaccaccgttaatacgccgcggatgccgcgtaacttccagcagttctttggcgacaattcgccgttctgtcaggatggttctccgttccagagctctccgttctgtcagggcggcgggcagggcggcgcgccgggtagcgacggcggccagcagcagaaatttatggccctcggttccggggtgattattgatgccgctaaaggctatgtcgtgactaacaaccacgtcgtggataacgcgactactatcaaagttcagctcagcgatggccgcaagttcgacgcgaaagtggtcggcaaagacccgcgttctgatattgcgctgattcaaatccaggatccgaaaaacctgagcgcgattaagctggcggactctgacgccctgcgcgtcggcgattacaccgtggcgatcggtaacccgtttggcctgggcgaaaccgtgacctcggggatcgtttccgccttgggccgtagcggcctgaacgttgaaaactatgaaaactttatccagaccgatgcggcgatcaaccgcggtaactccggcggcgcgctggttaacctgaacggcgagctgatcggtatcaacaccgcgattctggcgccggacggcggcaacattggtatcggcttcgctattccgagcaacatggtgaaaaacctgaccgatcagatggtcaaatttggccaggttaagcgcggtgagctgggcatcatggggaccgagctgaattccgaactggcgaaagcgatgaaagttgacgctcagcgcggcgcgttcgtcagccaggtgatgccgaactcggcggccgctaaggcggggattaaagccggcgacgtgattaccacgctgaacggtaaatcgatcagcagctttgccgcgctgcgtgcccaggtgggtaccatgccgatcggcagcaaagtcgagcttggcctgctgcgtgacggcaagccggtgacggtgaccgttgagctgcagcagagcaatcagaaccaggttgactccagcaccatcttcaacggtattgaaggtgcggaaatgagcaacaaaggtcaggataaaggcgtcgtggtgagtaacgtgaaagcgggaacgccggcggcgcagattggcctgaagaaaggcgatattatcgttggcgcgaaccagcagccggtgaaaaatattgccgacctgcgcaaaatttttgatgccaaaccgtcggttctggcgctgaatatccagcgcggcgatacgtcaatttatctgctgatgcagtaatccctgacggttcgcaaagccccttttctccttgcggaggagaggggcttttttatttctgccgccccttccatttttcgttctgtgatatcttccacaactccatatttcttagcccggctttgtgcaaatgcacaatgcggcgtgttgccaactcttttatgctggtagcctgctcacgggagggttacatggctggctggcatcttgataccaaaatggctcaggatatcgtggcgcgtacgatgcgcatcattgataccaatattaacgtaatggatgcccgcgggcgcattatcggtagcggagaccgcgagcgaattggtgaattgcacgaaggcgcgctattagtgctttcccaggggcgcgttgtcgatattgatgatgccgttgcccgacatctgcacggcgtgcgccaggggatcaacctgccgctgcgtctggaaggggagatcgttggcgttatcggcctgaccggcgaaccggagtcgctgcgtaaatacggtgaactggtgtgtatgaccgccgagatgatgctggaacaatcgcggctgatgcatctcctggctcaggatagccgtctgcgcgaagagctggtgatgaacctgattcaggcggaagagaacaccccggcgctgaccgagtgggcccagcgtctggggatcgatctcaaccaaccgcgcgtggtggcgatgattgaagtggatagcggccagctgggcgtagacagcgcgatggcggagctgcagcagctccagaccgcgttgaccacgccggaccgtaataatctggtggccattgtctcgctgaccgaaatggtggtactgaagcccgcgctgaacgcctttggccgctgggatgcggaagatcactgcaaacgggtcgagcagctcattagcaggatgaaagagaacggtcagctgcgttttcgcgtggcgctgggaaacttttttaccgggccgggcagcattgctcgctcgtatcgcaccgccagaaccaccatgatggtcggtaaacagcggatgccggagagccgtagctatttttaccaggatttgatgctgccggtactgctggatagcctgcgcggcggctggcaggccaatgagctggcgcgcccgctggttcgcctgaaggcgatggataacaacggcctgctgcgtcgcaccttacaggcctggtttcgtcataacgtgcagccgctggcgacgtcgaaagcactgtttatccaccgcaatacgctggaataccgtttaaaccgcatctctgagctgacggggctggatttgggtaattttgacgatcgtctgctgctgtatattgcgctacagctcgatgagcagcgctaaaaacactcccgccgcaggcgggagtggggacgggaattacaggcgctgcagcccgctggccgtgacttgccaggagacggtatgaggctgtggccaggcgttaccgttttgcgggttgataatgacggagcgatcgccggcttcggcatggaagacttcgatgatatagccttcatcaagtattgccgtatcaatatagtcgccaagctgcgctgaacctttaatggactggcgataaaccaccgagccgcgcgtattgtagatattcaccgcggcataggccgtcgtaaagtgcttattcggcaccacggggctggcggtaaaggtgagcgcgccgcggccaatatccatctccatcgtcgcaaaacgaatattatcattgccaagtagctgccaggagaagagatcgccatacagctctgttgcctcgtcctgagcatccgtggtttctttatcctccggatctggcaccagcgaacaggcctccagcccatccttcactacccgccagcggttgcgttgcttcagcgtaatggcgcgatgcgtcgtatcattgctggcgctggagcggaatggctcatcatggaaaacctcaatgatcatgttttcagcgagcgcgagagtttcgctgtttgccaggttgttggtcgctccggcatagctgcggtgataaaccaccgtttcgtccgctccggttaccgtaatgctggcataggtatgggaaacataatacgggtgcggcgcgccggtacgcgtggcgaccgtcatggcgtgctgctgattatcgataacgatctggcaaaaatctttattgccttgccctctgagattgagggtaacgcttttgcccgtcagttcgcccggttcgctattatcctgaggcaggacgtcggcatactctttaagcagcctgctgcgctgaggctcttcaatatgggggagcatcagccagagatcgtttttacatacgctctcttcctgcgctaatagcgagggctgcttacgcattgcctgcgcgtcatgctcgaaaatagccagtaaatcctctgccggattattgttgagaataaagttgtaaagcccactctcatcaatacgcattagctggcatttctcacccgctaccagcgttaaatactccggagaggttttcagccgccccggctcgacgtgagtaatatataagtgatagtgaggaccgaagggaataacctccttaccggtggcgcagttcgttccgttcatattgcgctcgaatactttttcgccgctggcggaaagtacgcatacgccggcatagagcgcgtcagggtagttgttgtgcggcgtggcgctggtaatattcagcgtaagctgctgattttcgtaatcgatatccagatatgcaaacggcgtgtcgccaatacctaaaaagctcatcgttacgttacgcccgcgggaatcgcgttgtcgggtgtagttgatggtagccgcatttgtcccttcttttacgacgagatagctgatatccggacgatatttttgtgaacgacctttcggaagatcgatctggtaaatgccgattggtatgtcattcaggatcaacgtgtcatcattaacgatcagtgaataatgcgtgccacaattatctttaatcgtcagcgttcgcccgtaaatttgttccagctggtcgatattgaacgtcagggatagcgtccccgttttgcctaatgccgccagttcgctgttatccaccagccacacgaaggagtccagccccagctgccgccgcgcgctatcccattcgctttgcggaaggaaaagatacagcggatagagcggttttgccgccagcgcggcgatatctcccttagtggtaatttccagcgttaagccgcatagctcgataaatggggtcacatcataccctgcggcggtggcgatagcggtagccagcatatcgacaagctgatgatcggacggccggaagctatcgccgttggccagttcgcgatagttctggttgaagctgcggaaggctttggttcctgcttttagcaacatcagcatcaggaattgcaggcgcggacgcaggccccagctggtgaccgaaacctggtctcgaatataggtcatcagctggagttcctgcacggcctgctgaccatagttatagagccagccatcaacataaagatgattatcctgactcagggtgagctgctggtaaaaagcggcgtaaatattgttccacacttcgttgacgggcagagtggtcgactgcataaacttaccctgatacccgtgcgcaatttcatggagaataacccattgcgtcgcaacgttatccagccagccttcacctaacgttgatgatgtatgagcgcaccacctggtgaaataataggctgcgccgaagccatgtttatctgcccgcacaaagtagcggttggcgacatcctggttccacggtgcgtcaggattatcgcttagtccagccaagtcgttatagcatttgaaaaggtgggtataaaaacggtgcagtgccggtaagcccgctttcatcgcattatcgcggtcggcatagggcagcagcagggtaatcacatctaaatcaagcagcgcgagtgcggattgatttttctcccagctgaggaaaaattcatcctcagattggcccgctttccaggtcggcagcggtttagttgcggcaggctgctggtagatgacggtaaattcacagggctggtcggtaaacagcgtatcgacaaaaggaacggtgtcgaccgttgcgcagaccgttttccagccggtggcgatcgtgcaggtgctctctagcgcggtatcattgcaaagcaggcgcagaatcgagttgccgttgctgatatccggttggcgaatgtgcagcggcgtattggcgggcagaataaagcccagcggctggcgatcgtgcagccgtcctttttcaaagccggccttatccagccagggcgcagattgtagggtataaaatttttgttcaatttcctgtgtcatcgtatgatctcctttcaggtggaaattgaacatacagcgaattattttattatgtcattcatgtagatagggatatgagatgaaatgatatcagagaggaatagctgatattcgctgatgctgccggtgggggatgagtgagaaaaaagagggtgaggcagagggaaacagggccagtacctggcccgtatcaggcttacttattgcgggtcagtttttccagatcggattcgatttcgctgatcttattcgtcaccacgctttcgaggtgacgcagatcgtcgaggatcttacgtttcagatcgatttcggtgcgatcgcgctgacagatttgatccagctcgtcgatgatatagcgtaggttagggctaatctcctggacttctttatatccctggcccacgccgtcggcgaccacggttttgcgctgacgcggatatttgaacttgacgctcttggcgaagaactcgcctttatccttctgaaagtagattttcagaatgtcgttgttggcttcctgccgcaggctatagcgatcgatttcatcaggattggtaataccaagacttttcagattatcgtacataacggtacctttgatatcatcgtaatctttgaataattaacgaaaaaatccatcttcgccagctcaatatataaaaaaagcgggatgcctcccgcttttcatgctgcttagtcgatggtacgcagaagttcgttgattccaaccttgccgcgggttttggcatcgacttttttgacgataaccgcgcagtacaagctgtacttgccatcttttgacggcaggttgccggagacgacgacggatcccgccggaacgcggccgtagaagacttcaccggtttcgcggtcgtagattttggtgctctggccgaggtatacgcccatggagataacggaaccctcttcgacgatgacgccttcaacgacttccgaacgcgcgccgataaagcagttatcttcgataatggtcgggttagcctgcagcggctccagtacgccaccgatgccgacgccgccggacaggtggacgtttttgccgatctgcgcgcaggaacccacggtcgcccaggtatcaaccatcgaaccttcgtcaacgtaggcgccgatgttcacataggacggcatcagaaccgtgttgcgagcgatatacgccccctgacgaacggccgccggcggaacgacgcggaaaccttctttctggaaacgcgcttcatcataatccgcgaacttcattgggactttatcgaagtagcggctttccgcaccatcgataacctggttatcgttaatacggaaagagagcagaaccgctttcttcagccactgatgggtgacccactggccgtcaactttttcagcgacacgcagcgcgccggaatcaagcagagaaatcacctggttaaccgcttcgcgggttacggtatccacgtttgccggcgtgatgtcggcgcgacgctcaaaagcggactcaataacgttctgtaattgctgcattgtttactctttccatttacttaaaaaaatacgttaccctttatcgtttggattgagggcctctgtcaaccgttgttgcacttcttgctgtagctcattattaagggcgcgccggtctgcggtggcgattataaataaatcttctactcgctcaccaattgtcgtaattcgcgcgccgtggagcgaaattccgaggtcggcaaatacctggccgacgcgcgctaacagacccggctggtcgagagcaatcagctcaagaaaggatttccggtcggtatgcgtcggcaggaaattcacctccgtcggcacggaaaaatgcctcagcttcgccgcctgacgacggggcgccgggggctgccagctgcgctggctgatggtctgttccaggcccacgcggatcatttcgtgcctgtcggcggaaagcgggctgccgtccggctcaagaacaataaaggtatccatcgccatgccatcgcgggtggtgaagatctgcgcatcgtgaacgcttagattacgtcgatccagctcgccgcaaacggcggcgaagaggtaaggacgatccggactccagatgaagatctcggtgcccccgcgcgaggcgtgggaactgagcaggatcatcggtttgctgagatcgtgctgcagcagattacgcgcgtgccaggcgagctggtttggcgtatggcgcacaaagtagttggcgcggcagcggttccagatttggtgcagcgcctgttcattaatattttccatccgcagcagcgccagcgcctgtagctggtggtgacgcacccgctcgcgcatatccggcgtgttttgcatcccccggcgcagctgtttttcggtggcgaaatagagctcacgcagcaggctctgcttccagctgttccacaggttttcgttggtggcgcagatatcggcgacggtcaggcagaccaggtagtgcagacggttctccgtttgcacctcttcggcaaactgcttgatcacttccggatcctgaatatcgcgacgctgggcggtgaccgacatcagcagatgatgacgcaccagccacgccaccagctgggtttcgcgcgagttaagaccgtgaagctcggcgaatttcagcacgtcctgcgcgccgagaatcgaatggtcgccgccgcgccctttcgcgatatcgtggaagagggcggcgataaggatcagctccggatgcgtcaggcgcggccacagttcaacgcacagcggatgccggctgcgggtctcttctttggcgaagctctcaagcttaagcagcacgcggatcgtgtgttcatcaacggtataggcgtgaaacaggtcaaactgcatctgaccgacaatatgcgaccattgcggcatataggcccacagcacgctatggcggtgcatcggcagcagcccccggctgaccgcgccctgatggcgcagcatgctgaggaacagggtccgcgcttccggaatatagcaaagcggctgcgtcagatgacgacgggcgtggcgcaaatggcgaagcgtggtggagtagatgccggtaatgctgctgttacgcaccatcataaagaacatgcgcagaatcgcctgcggttcgcggatgaacagcgagtcatcgcgcagatcgattagcgtgccgcgcagctgaaaatcatcgtcaattggccgcggcttctcatcttcggtgagcgccagaatcgcctcttcgaacagctggatcagcatttggttcagctcgctcacccggcgggtgacgcgaaagaaatccttcatcatgtgctcgatcggctggttgctttcgccttcgtaacgcaggcggcgggcgacgctgaactgcctgtcgaacagcagacgattatcgtagcggttgagctccagatgcagcgcaaagcgaatgcgccacagctgatgcaggcattcgttaagctcgttgcgctcggcttcggtcaggaaaccgaagccgaccatttcatcaagcgaggtggcaccgaaatggcggcgcgcgatccactgcagggtgtgaatatcgcgcaggccgccggggctgcttttcacgtccggctcgaggttatagctggtcccgtgatagcgctgatggcgtacattctgctcttcgacttttgccgcaaagaacttttccgatggccagaagccgtcgctgaatatgtgtttttgcagttcaaggaacagcgcgacgtcgccaataagcagacgcgattcaatcaggttagtggcgacgctgaggtccgacagcccctccagcaggcactcttcgagggtgcgcacgctgtggccgacttccagcttgatatcccacagcagcgtcagcagctcgccgaccttctgcgcctgctcatcgggcagctttttacggctcaggataagcagatcgatatcggaaagcgggtgcagttcgccgcggccgtaaccgccgacggcgaccagcgcgatgtcgttcatcgacccgaacccgtactcgacccatagccgctgaagcagctgatcgataaattcggtgcgcgcctcaatcaatctctctgcggcgatgccgtggtcaaacgcttcgcccagccagcgctgaaaagcgtcgatgtgcgccttgatagccgcgcagttgaagtcgctctgcggccagcggcccggattcgccggctggtcgtccagggcaggggagacagtatcagataaagagttgctcatcgcgccaccataataaaaaactatcacccataaaaaatcgccgggagcgatttttaacgtcgcttgcggcggcccatagggtgacgggcaggacgcccgtcataaaaaatcgccgggagcgatttttaacgtcgcttgcggcggcccacagggtgcccgtcataaaaaagccggctggcgccggcttttcatcattcgttgtgcgagattatcgccgggatggtgtcatccttgcgtaacgtcagtatttcgcagccgctgtctgtcaccacaatagtatgctcatactgcgcagacaagctccggtctttggtttttaccgtccagccgtctttcatactgcggatctcttttttacccgcgttgaccatcggctcaatggtaaaggtcatgccgggtttgagcaccacgttggtttccggagagtcgtaatgcagcacctgcggttcttcatggaaaccgcggccgataccgtggccgcagtactcgcgcacgacggagaaaccttcggcttcaacgtatttctggatagccgcgccgatagcgcgcagattaacgcccggtttgaccattttcagggccagatagaggctttcctgggtaatgcggcacaggcgctcgcccagaatggtcggtttaccgacgataaacatcttcgaggtatcaccgtggaaatcatctttaatgacggtgacgtcaatgttgacgatatcgccatctttcagcagcttgccgtcgtccgggatcccgtggcacaccacttcattaatagagatgcagacggatttcgggaagccgtggtagcccaggcaggcggatacggctttttgttcgttaacgatataatcgttgcagatgcgatccagttcgccggtgctgacgcccggttttacgtagggttcgatcatttccagcacttcagcggccaggcggccggcaacgcgcattttttcgatgtcttcagatgtcttgatagaaatagccatggattgtgtccagcagtgtcgattttttcgacaataatagattatgtcggaacaatgttaacagtccgggcgtcctgctgccaaattgagaatcattagcagcacgcgacgtcaacaacagttggtgtctgctcctgttttgtggtataaagcgcgccggacttctgttccattctcagatacacaagatggactgaagcgacaaatctcactttgtgtaacaacacacacgtatcggcacatattccggggtgccctttggggtcggtaatatgggatacgtggaggcataaccccaacttttatctatagaggttttaaacatggcaactgtttccatgcgcgacatgctcaaggctggtgttcactttggtcaccagacccgttactggaacccgaaaatgaagcctttcatcttcggcgcgcgtaacaaagttcacatcatcaaccttgagaaaactgtaccgatgttcaacgaagctctggctgaactgaacaagatctcttctcgcaaaggcaaaatccttttcgttggtactaagcgcgctgcaagcgaagcggtaaaagacgctgctaacagctgcgaccagttcttcgtgaaccatcgctggctgggcggtatgctgactaactggaaaaccgttcgtcagtctatcaaacgtctgaaagacctggaaactcagtcccaggacggtactttcgacaagctgaccaagaaagaagcgctgatgcgcactcgtgagctggacaagctggaaaacagcctgggcggtatcaaagacatgggcggcctgccggacgcgctgttcgttatcgacgctgaccacgagcacatcgcaatcaaagaagcaaacaacctgggtattccggtatttgctatcgttgatactaactccgatccggacggcgttgacttcgttatcccgggtaacgacgacgcaatccgtgcagttagcctgtacctgagcgctgttgctgctaccgttcgtgaaggccgttctcaggatctggcttctcaggcggaagaaagcttcgtagaagctgaataataaggcatacccttatttagtaccgtgtataaataggggcctcttagcggcccctttttcactttcaaatctgtctggttcctggaaccgggccgatcacatctcccgaggaataaagaatggctgaaattaccgcatccctggtaaaagagctgcgcgagcgtactggcgcaggcatgatggattgcaaaaaagcgctgactgaagcgaacggcgacatcgagctggcaattgaaaacatgcgtaaatccggtgctattaaagcagcgaaaaaagcgggcaacgttgccgctgacggcgtgatcatcactaaaattgatggcacctacggcatcattctggaagttaactgccagactgacttcgtggctaaagatggtggcttccaggcgtttgcaaacaaagttctggatgcagctgttgcaggcaaaatcaccgacgttgaggttctgaaagcacagttcgaagaagaacgcgttgcgctggttgctaaaatcggtgagaacatcaacatccgtcgcgtttcttccctggaaggcgaagttctgggctcttaccagcacggcgcgcgtatcggtgttctggttgccgctaaaggcgcgagcgaagagctggttaaacagctggctatgcacgtcgctgcaagcaagcctgaattcgttaagccggaagacgtttccgctgaagtggtcgaaaaagagtaccaggttcagctggacatcgccatgcagtctggcaagccgaaagaaatcgcagagaaaatggttgaaggccgcatgaagaaattcaccggcgaagtttctctgaccggtcagccgttcgttatggacccgagcaaatccgttgctcagctgctgaaagagcacaacgctgacgtgactggcttcatccgctttgaagtgggcgaaggcattgagaaagttgagactgactttgcagcagaagttgctgcgatgtccaagcagtcttaattttcaaaaggagccgcctgagggcggcttctttttgcgcctaatgtgtaaattcagccaaccgctatagtgggcacgctgaaaagcgacgtacaatgtcgccagaataaattcatctcattcgttgacagtctcaggaaagaaacatggctaccaatgcaaaacccgtctacaaacgtattctgcttaagttaagtggcgaagctctgcaaggttcggaaggcttcggtattgatgcgagcatacttgaccgcatggctcaggaaatcaaagaactggttgagctgggtattcaggttggcgtagtgattggtggcggtaaccttttccgtggtgctggtctggcgaaagcgggtatgaaccgcgttgtgggcgaccacatgggcatgctggcaacggtcatgaacggccttgcaatgcgtgatgcacttcatcgcgcctatgtgaacgcccgcctgatgtcagcgattccgctgaatggcgtgtgcgataactacagctgggcggaagctatcagcctgctgcgtaacaaccgcgtggtgattctttccgcgggtaccggcaacccattctttaccaccgattccgctgcctgcctgcgcggcattgaaattgaagccgatgtggtactgaaagccaccaaagtcgacggtgtatttaccgccgacccggccaaagatccttccgcaacgatgtacgatcagctgacctacagcgaagtactggataaagagctgaaagtgatggatcttgcggcctttaccctggcgcgtgaccacaaactgccgattcgcgtattcaatatgaataagcctggcgcgctgcgccgcgtggtgatgggtgaaaaagaaggcacattaattactgagtaattcccgttagcgtcaaatacgggtaatattcggccttactttttcgggtttttgacccgatggttttcaacatgctctgtggacggaatgctgcggctgacccgtagcctgaaagacgctgagcataaacatgactatacttagctcacttttgcagtgggcgaccgtctggtctgtctgagacaaattttcaaggattcgtaacgtgattagcgatatcagaaaagatgctgaagtacgcatggacaaatgcgttgaagcgttcaaaacccaaatcagcaaaatacgcacgggtcgtgcttctcccagcctgctggatggcattatcgtggaatactacggcacgccgactccgctgcgtcagctggctagcgtaacggtagaagactcgcgcacgctgaagatcaacgtcttcgatcgctccatgagcccggccgttgaaaaagcgattatggcttccgatctcggtctgaacccaagctctgcgggcagcgatatccgcgttccgctgccgccgctgaccgaagagcgtcgtaaagatctgaccaaaatcgtgcgtggcgaagctgaacaggcgcgcgttgccgtacgtaacgtccgtcgcgatgccaacgacaaagtcaaagcgctgctgaaagagaaagagatcagcgaagatgacgatcgccgctctcaggaagatgtgcagaaaatgactgatgctgctatcaagaaagttgatgcggcgctggcggataaagaagcggaactgatgcagttctgattctctgccgacacgcaggtctgacgatcggcctgcgtaaaatctgaaacgccgtacaggagaccgtacgctcaattttcgggattgcgtttagacggctggccttgtagcctttggcgccatgtcaaaggccttgcgcctccgctctgtcaaccgataattgatgcataagggtttgctggcggcgttttgctttttatcctgtcttcattattctggacgcctcatgaagcaattaaccattcttggttcgaccggttctatcggctgcagcacgctggatgtggtgcgccataatcctgatagcttttctatcaccgcgctggtcgccgggaaaaatgtcgaccgtatggttgaacaatgtctggaattctcccctcgttacgcggtaatggacgatgcgcacagcgcggagctgctgcgtgcgcaactgcgcgagcagggctgccgaacggaagtcatgagcggccagcaggcggcggcagaagtggcggcgctcgacgaggttgagcaggtgatggcggcgattgtcggcgcagcaggcctggtgccgacgctctcagccattcgtgcgggtaaaacggtgctgctggcgaacaaagagtcgctggtgacctgcggccgtctgtttatggatgccgtgcagcagtacggcgcacgattgttgccggttgatagcgagcataatgcgatttttcagagtatgccggaaacaattcaacataatctgggatacgctgatttaacccagaacggcgtggcgtcgattctgctcactggctccggcggtcccttccgggaaacggcgatttctgaactggcggcgatgacccccgatcgggcatgcaagcatccaaactggtcgatggggcgcaaaatatctgtcgattcggccaccatgatgaacaaagggctggagtatatcgaagcccgctggctgttcaacgcctcggcgcagcagatggaagtcctgatccatccgcaatcggtgattcactcgatggtacgttatcaggatggcagcgtcctggcgcagctcggcgagccggatatgcgtacgccgattgcccacacgatgggctggccaaaacgccttaattctggcgtgaaaccgctggatttctgtcagttgagcactctgagcttctcggcgccggattacggccgttacccctgcctgaagctggccatggaggcttttgatgtcggtcaggcggcgaccacggcgctgaatgcggcaaatgaagtttcagtcgcggcgtttctgaacggggatattcgctttaccgatattgcggcgataaatcaggcggtgctggatcaacaggcgttaaatgagccgcaaagtattgatgaagtgctggctattgatgcgatggcccgggtaagcgcaggccagctcctgacggcgtggcgcaaattctgatacgcgttgtgatatttgtgggcgctgtgcttcagtgatatagtctgcgccatccgatcgttgcattttggtgtgaaagattacggtggccgtggcaagacacggcttttttgcgtaaagcttttggttgttctctgcgattggccgtagctccggcaccggataaaaatgcgtatccagcgctgaccggtggcccgtgtttagtagcttagctaatccttattatggacttaaaacgcgttatgttgtctgctaatcaaactgtcagcgaaatgttgcctgcgcatggctgtcgtcatgtggccattattatggatggcaacgggcgttgggcaaaacggcaaggaaagatccgcgcctttggccataaagccggcgctaaatctgttcgtcgcgccgtctctttcgcggcgaataatggtattgaagcgttgacgttatacgcgttcagcagtgaaaactggaatcgcccggcgcaggaagtcagcgcgctgatggagctgtttgtctgggcgctggatagcgaagtgaaaagtctgcaccggcataatgtgcgcctgcgtattatcggcgagaccacgcgcttcaatgcgcgtctccaggagcgtattcgtaaagcggaggcgctgactgagaacaacaccggtttgaccctgaatattgcggcgaactacggcggccgctgggatatcgtccagggcgttcgtcatctggccaaacaggtgcaagacggggtgcttcagcccgagcaaatcacagaagagatgctgagccagcaggtctgcatgcatgaactggctcccgtagatttagttattaggaccgggggagagcatcgcattagtaattttttgatttggcaaattgcctatgccgaactttactttacggatgttctttggcccgatttcgctgaacaggactttgaaggtgcactccatgcctttgttaatcgagagcgtcgcttcggcggcactgagccgggcggcaacaatgcctgatgggggtcacttttgctgaagtatcgcctgatttctgctttcgtcttaatacccgttgttattgcggcgctttttttactgccgcccgcgggttttgccatcgttacgctagtcgtctgtatgctcgccgcgtgggagtgggggcaatttagcggtttcacttcaactacccagagagtctggctgtcagtgctttgcggtttgctgctggcgctgatgctattcctgatgccggaataccattatgacgttcatcaaccgctggttgagggcgcgctatgggcgtcattaggctggtgggtcgtcgcgctgcttttagtgctgacttaccccgcttcagcggctttctggcgcaattcaaaaacgctccgtctgatttttggcgtcctgaccatcgtgccgtttttttggggcatgctggcgcttcgggcctggcattatactgatgaccattatagcggtgcgctgtggttgctgtacgtaatgattctggtctggggcgcggattccggcgcttacatgttcggaaaaatgttcggtaagcataagctggcgccgaaggtttctccgggtaaaacctggcagggttttttcggcggtctgttaacggcagcggttatctcctgggcttacggctggtgggcccatctgaatgttacgccgatggtgctgctggtgtgttctattgtcgcggccctggcttcggtactcggcgacctgaccgaaagcatgtttaaacgcgaagctggcattaaagatagcggaaatctgattcccggacacggcggtatcctcgatcgtatcgatagcctgacggccgcggtgcccgtgtttgcttgcctactcttgttggttttcaggacgatttgacggaaggttttatgctgagcgttctctggaatttggctgcttttattattgcgctgggcgtgttgatcaccgtccatgagtttggccatttctgggttgctcgccgctgcggtatccgcgttgagcgtttctcaatcggctttggcaaagcgctgtggcgccgttttgacaagcaaggaacggaatttattatcgcccttattccgctgggcggttatgtcaaaatgctcgacgaacgcgttgagcccgtggcgccagagatgcgtcactccgcgtttaacaacaaaaccgtcggccagcgcgccgccgttattgccgcggggccaatcgcgaacttcctttttgccatttttgcctactggctggtgtttattatcggcgtgccaggcgtgcgtccggtcgttggcgacataacgcccaactcgatcgccgcgcaagcacaaattgcaaaaggaacggaacttaaagcgatagatggcatcgaaacgcctgattgggatgcagtacgtatggcgctggtggcgaagataggcgatcggcaaacaatagttacggtcgcccctttcgggaccaatcaacgtcaggataaaatcctcgatctgcagcactgggcgtttgagccggataaacaagatccggttgcctcgttgggcattcagcctcgcagcgcgcagattgataccgtcctggctgaagtacaatctgactcggcggcgcagaaggcgggtttgcaagcgggcgacaggatcgttaaagtcgatggtcaaccgttaacgcagtggatgacgtttgttaatctggtgcgtgataatccgggtagggcattagttctggacatcgagcggcagggtagccccctgtcggtgaccttgacgccggatacgaagtctaccaaaggcaaagcggaggggtttgcaggggtcgtacctaaggtcatcccgctgcctgatgaatataagacagtgcgtcagtacgggccatttgccgccatcgctgaagccacggataaaacctggcagctgatgtcgttaacggtccgaatgctgggcaaattgataaccggtgatgtcaaactgaacaacctcagcgggccgatttctatcgcccagggggctgggatgtcagcggaatttgggttgatttactatctgatgttccttgcgctgatcagcgtgaacctcggcataatcaacctgttcccgcttcccgttctcgacgggggacatctgctgtttttggcgattgaaaagctgaaaggcgggccggtatccgagcgagttcaagactttagttatcgcattggctcaatattgctggtgctgttaatggggcttgcacttttcaatgatttctctcggttgtaagagagtttgttaggaagaacgcataataacgatggcgatgaaaaagttgctcatagcgtcgctgctgtttagcagcgcaaccgtatacggtgctgacgggttcgtggtgaaggacattcatttcgaaggccttcagcgagtcgctgttggtgcggccctcctcagtatgccagtgcgtcctggcgataccgtaaccgatgatgatatcagtaacaccatccgtgctctgtttgccaccggcaactttgaggacgtccgcgtactgcgcgatggtgataccctgctggtgcaggtgaaagagcgtccaacgattgccagcatcactttctccggtaacaagtcggtgaaagatgacatgctcaagcaaaaccttgaggcatccggcgtgcgcgtaggggaatccctcgatcgcaccacgctggctgatatcgaaaaggggctggaggatttctactacagcgtcggtaagtacagcgccagcgttaaagctgtcgtgacgccgctgccgcgtaaccgtgtcgacctgaagctggtattccaggaaggcgtctcggcgaaaatccagcagatcaatatcgtcggtaaccacgcattcagcaccgatgaactcatttctaccttccagctgcgcgatgaagtgccgtggtggaacgtggttggcgatcgtaaatatcagaaacagaagctggcgggagatcttgaaacgctgcgcagctactatctggatcgcggctatgctcgtttcaacattgactccacgcaggttagcctgacgccggacaaaaaaggtatctacatcaccatcaacattaccgaaggcgatcagtacaagctttctggtgtgcaggtgacgggtgacctggcggggcattcggcagaaatcgaagcgctgaccaaagtggagccgggcgagctgtataacggcaccaaagtgaccaaaatggagaatgacattaagaaactccttggtcgctacggctatgcctatccgcgcgttcagtcccagccggaaatcagcgatagcgataagaccgtgaagctgcacgtgaacgtcgatgcgggtaaccgctactacgtgcgtaaaattcgcttcgaaggcaacgacacctcgaaagatgccgttctgcgtcgcgaaatgcgtcagatggaaggcgcctggctgggcagcgacctggtcgatcagggtaaagatcgtctgaaccgtttaggctactttgaaacggttgataccgatacgcagcgcgttccgggcagcccggatcaggttgacgtggtctataaggttaaagagcgtaacaccggtagctttaacttcggcgttggttacggtacggaaagcggcgtcagcttccaggccggcgttcagcaggataactggctcggtaccggctattccgttgggattaacggcaccaaaaacgactatcagacctatactgaactgtcggtgacgaacccgtactttaccgtggatggcgtcagcctcggcggtcgtgttttctataacgacttcgacgctaacgatgcggacctgtctgactataccaacaaaagctatggtacagacatcacgctgggcttcccggttaacgaatacaatacgctgcgcgcgggcctgggctatgtgcataacaagctatccaacatgcagcctcaggtatccatgtggcgttatctgaattcgatggggcagtatccggacaacaccaacgacagaaactcgttcagcgctgacgacttcaccttcaactacggctggacgtataacaagctcgaccgtggcttcttcccgaccgaaggctcacgcgtcaacctgaacggtaaagtgacgattccgggatcggataacgaatactacaaagcgacgctcgataccgcgacctatgtaccgatcgatgacgatcataaatgggtgatgttgggtcgtacccgctttggttatggcgatggtctgggcggtaaagagatgccgttctatgagaacttctatgccggtggttcaagcaccgtgcgtggcttccagtccaatactatcggtccgaaagcggtttatttcccggccagcagccgtcatgacgacgacagcagctacgataacgaatgtaagagcagcgagtccgcaccgtgtaagtctgatgatgcggtgggcggtaacgccatggcggttgccagccttgagctgatcaccccgacgccgtttattagcgataaatatgcgaactcggtccgtacttccgtcttctgggatatgggtaccgtgtgggatactcactgggattcagccgcatatgggggttacccggactacagcgatccaagcaatatccgtatgtctgcgggtatcgcagtacagtggatgtcgccgttagggccgttggtattctcctacgctcagccgtttaaaaagtacgatggagacaaagccgaacagttccagtttaacatcggtaaaacctggtaatggtattggctacaatggaatgtaagtgcagttgcagtatagcgctgactattggcgataactgaggttgtcgcctggccacgcaaataacggtacccctgggtactcatgggatggtaaggagttaattgtgaaaaagtggttattagctgcaggtctgggtttagcaatggtaacttccgctcaggcggcagataaaattgcaatggttaacatgaacagcctcttccaacaggttgcccagaaaacaggcgtttctaacacgctggaaaacgagtttaaaggccgcgcgagcgagctgcagcgtatggaaggcgacctgcagtctaaaatgcagcgtctgcagtccatgaaagcgggctctgaccgtaccaaactggaaaaagacgtgatggctcagcgccagactttctcccagaaagcgcagtctttcgaacaggatcgtgcacgtcgttctaacgaagagcgcggcaagctggtgactcgtattcagagcgctgtgcagagcgtggctaaagatcagagcatcgatctggttgttgactctaatgccgttgcatacaacagcagcgatgtaaaagacatcaccgctgatgtgctgaaacaggttaaataagtaatgccttcaattcgactggctgatttagcccagcagttggatgcagaattacacggtgatggcgatatcgtcatcaccggcgttgcgtccatgcagtccgcacaagcgggcgatattactttcatggtaaatcctaagtaccgtgaacacctggccgcttgccaggcatctgccgtcgtgatgacgcaggatgatttaccttttgctcatagcgccgcgctggtagtgcgtaatccctacctgacctacgcgcgcatggctcaaattcttgataccacgccgcagccggcgcaggatatcgcgcccagtgcggtcatcgatgcgacggcgaagctgggtgcccacgtggcgattggcccaaacgccgtgattgaatcgggcgtcatcctcggtgataacgtggttatcggcgcgggctgcttcgttgggaaaaatacgaaaataggtgccggctcgcgtttatgggccaacgtcaccgtttaccacgacattgagatcggcgagaattgcctgatccagtccagcacggtgattggcgcagatggcttcggctacgcgaacgatcgcggcaactgggttaagatcccacagcttggtcgcgtgattattggcgatcgcgtggagattggcgcctgtacgaccattgaccgtggtgcgctggacgacaccgtcatcggtaacggcgtgattattgataaccagtgtcaaatcgcgcacaacgtggtgattggcgacaacaccgcggttgctggcggcgtcatcatggcgggcagcctgaagatcggccgctactgcatgattggcggagccagcgtgatcaacggccatatggaaatctgcgataaagtcaccgtcacggggatgggaatggttatgcgtcctatcaccgagccaggggtttactcttcaggtatcccgctgcagccgaataaggtctggcgtaagaccgctgcgctggtactgaatattgatgatatgagcaagcgcctcaaagccattgagcgcaaggttaatcaacaagattagtgctgcgtccagccacattaaattttcggcctgttgcattcatgagattgccgcaggccgtgttattattgccttttaggatatttagacaggaagagtattttgactactgacactcatactctgcacattgaagagattctggaacttctgcctcaccgatacccgttcctgctggtcgatcgcgtgctggattttgaagaaggtcgttttctacgcgcagttaaaaatgtttctgtaaatgagccgtttttccaggggcatttccctggtaagccgattttaccgggcgtattgattctcgaagctatggcccaggccaccggcattctggcattcaaaagcgttggaaaactggaaccgggcgagctgtattattttgccgggattgacgaagcgcgtttcaaacgtccggtcgtgcctggcgatcagatgattatggaagtcacttttgaaaaaacccgccgcggtctgactcgctttaaaggcgttgcaaccgttgacggaaaagtggtttgcgaagcaacgatgatgtgtgcccgtagccgggaggcctgatacgtgattgataaaaccgcctttattcatccttccgccattgtagaagaaggcgccgttattggcgctaacgtccacgttggcccgttttgtattgttggtgctaacgtcgaaatcggcgaaggtaccgtactgaaatctcacgttgtcatcaacggccataccaaaattggccgcgataacgagatctatcagttcgcttccatcggcgaagttaaccaggacctgaaatatgctggcgaaccgacccgcgtggaaattggcgatcgcaaccgcatccgcgaaagcgtcaccattcatcgtggcacagtacagggcggtggattaacgaaggtgggcagcgataacctgctgatgatcaacgcccacgtggcgcacgattgtacgctgggcgaccgctgtattctggccaataacgcgacccttgcgggccacgtttcgctggatgattttgttatcatcggcggcatgaccgccgtgcatcagttctgcattattggcgcacacgtgatggtgggcggctgctccggcgtagcgcaggacgttccgccgttcgtgattgcgcagggcaaccacgcgacgccgtttggcgtcaacatcgaagggttgaaacgtcgcggcttcagccgtgaggcgatcactgcgattcgtaacgcgtataagctgctgtaccgcagcggtaaaacgctggacgaagcgaaagctgaaattgccgagctggcggcgcagtatcccgaagtgcagacctttaccgacttttttgcccgctccacgcgcggcctgattcgttaatggctgaattgcgtcccctgacgattgccctggtcgccggagaaacctccggcgatattcttggtgccggtcttatccgcgcgctcaaagcccgcatacctgatgcccgctttgtcggcgttgccgggccgttgatgcaggcggaaggctgcgaagcctggtatgagatggaagagctggcggtgatgggcattgtggaagtgctgggtcgcctgcgccgtctgctgcatattcgcgccgatctcacccgtcgattgaccgagcttaagccagacgtattcgtcggcattgatgcgcctgacttcaatattaccctcgaaggtaatctgaagaagcagggtatcaaaaccatccattacgtcagcccctcggtgtgggcatggcggcaaaaacgcgttttcaaaattggcagatccaccgatctggtactggcatttctgcctttcgaaaaagcgttttatgacaaattcaacgttccctgccggtttatcggccacacgatggcggatgcgatgccgctggacccggataaaggcgcggcgcgcgaccgtctggggatcgatcgtaacgtgcattgcctggcgctgctgccgggaagccgcggggcggaagttgagatgctcagcgctgattttctgaaaacggcgcagctcctgcgagaccattatcccgacctggaagtggttgttccgctggtcaacgcgaaacggcgggaacagttcgagcgcatcaaagcggaaacggcgccggatcttgccgtccacctgctcgacggccgggcgcgcgatgcgatgatcgccagcgatgccgcgctgctggcctccggcacggctgcgctggagtgtatgctggctaagtgtccgatggttgtcggctatcggatgaagccgtttaccttctggctggcgaaacggctggtgaagaccgactatgtgtcgttgccgaatttactggccgggcgcgaactggttaaagaactgctgcaggatgaatgccggccgcaggtgctggccgaggcgctgaagccgctgctggccgacggaaaaaccagccacgatatgcatgaaaccttccgcgcgctgcatcagcagatccgctgcaacgctgatgagcaggcggcggatgccgtactggagttagcaaaatgatggaattcgtatatccgcatacccatctggttgcgggagtcgatgaagtcggacgcggcccgctggttggcgcggtggtgaccgccgcggttattctcgatccggcaaagccgatcgtcggtcttaacgactcaaaaaagctaagcgaaaaacgccgccttgcgctatttgacgagatcaaagaaaaagcgctgtgctggagcctcggtcgcgctgagccgcatgaaatcgatgagctgaatattttgcacgcgaccatgctggccatgcagcgcgccgttgccggtttgcgcgtttcccctgagtttgttcttattgatggtaaccgctgtccgccgctgccgatgccgtcactggcggtcgtcaaaggcgacagccgagtggcggaaatcagcgccgcgtctattctggctaaagtgacgcgcgatgctgaaatggccgtactggaccgggagttcccgcagtacggctttgcgcaacataaaggttatcccaccgcttttcatctgcaaaagctgctggaacatggcgtaatcgagcaataccggcgcagctttggcccggtgaaacgcgcgctgggcctggcgtcctgaactgacacgcaagcaattaagtaacgcggaatctgaagatggctgaaccacgtttcgtacacctgcgggtgcacagcgactattccatgatcgatggtctggcgaaaaccggaccgttggtaaaaaaggcggccgcgctcggcatgcctgcgctggcgatcactgattttaccaacctctgcgggctggtgaagttctacggagcagggcacggtgccggaattaaacccatcgtcggggccgatttccacgttcagagcgatctgcttggcgatgaactgagccagctgacggtactggcggcgaacaacgctggctatcaaaacctgacgctgctgatctccaaagcctatcagcgcggctacggcgcggcaggcccgattatcgatcgcgactggctgatcgaattaaaagaagggctgattttgctctccggcgggcgtatgggcgacgtgggtcgtagcctgctgcgcggaaacatggcgctggtggatcagtgcgttgatttttatgaacaacatttccctgattgctacttccttgagctcattcgcaccggccgtcaggatgaagagccctacctgcatgcagcggtagaactggcggaaacccgcggcctaccggtggtggcgaccaacgatgttcgcttccttgagccgggcgacttcgacgcccatgaaatccgcgtggctatccacgacggctttaccctcgacgatcccaagcgtccgcgcaactactcgccgcagcagtatatgcgcagcgaagaggagatgtgcgagctcttttccgatattcccgaagcgctgcaaaacaccgtggagatcgccaaacgctgtaacgtgaccgtgcgccttggcgagtacttcctgccgcagttcccgacgggggatatgaccaccgaagattatctggttaagaaatccaaagagggtctggaagagcgtctggaattcctgttccccgatccggatgagcgggctaaacgccgtcctgaatatgatgaacgcctggatattgagctgcaggtgattaaccagatggggttcccgggctacttcctgatcgttatggagtttatccagtggtcgaaggataacggcgtgccggtagggccgggacgtggttccggcgccggatcgctggtggcctatgcgctgaaaattaccgacctcgatccgctggagttcgacctgctgttcgaacgtttccttaacccggaacgtgtctccatgcccgacttcgacgttgacttctgtatggagaagcgcgaccaggtgattgaacacgtcgcggacatgtacggtcgcgatgcggtctcgcagattattaccttcggcaccatggcggcgaaagcggttatccgcgacgttggccgcgtgctgggccacccgtacggctttgtggaccgcatttccaagctggtaccgcccgatccgggtatgacgctggcgaaagcgtttgaagccgagccgcagctgccggagatttacgaggcggacgaagaggttaaagcgctgatcgacatggcgcgtaagctcgaaggggttacccgtaacgccggtaaacatgcgggcggggtggtgattgcgcccaccaaaataaccgattttgccccgctgtactgcgatgaagcgggccagcatccggttacccagtttgataagaacgacgttgaatatgccgggctggtgaagttcgacttcctcggtctgcgtacgctcaccatcattaactgggcgctggagatgatcaacgcccgccgcgagaagaacggcgaggggccgctggatatcgccgctatcccgctggacgataaaaaaagcttcgacatgctgcagcgttcggaaaccaccgccgtcttccagcttgaatcgcgcggtatgaaggatctgatcaagcgtctgcagcctgactgctttgaagatatgatcgctctggtggccctgttccgaccggggccgctgcagtcgggaatggtggataactttattgaccgtaagcacggtcgcgaagagatatcgtatccggacgtacagtggcagcacgaatgcctgaaaccggtactggagccaacctatggcattatcctgtaccaggaacaggtcatgcagattgcccaggagctttccggctataccctcggcggcgcggatatgctgcgtcgtgcgatgggtaagaaaaagccggaagagatggccaagcagcgcggcacctttgaagaaggggcgagaaagcgcggcgttgacggcgaactggcaattaaaatctttgatctggtagagaagttcgccggttatggatttaacaaatcgcactctgccgcttatgctttagtgtcctatcagacgctgtggctgaaggcgcactatccggctgaatttatggcggcggtaatgaccgctgatatggataacaccgagaaggtcgtcggcctggtggatgagtgctggcggatggggctgaaaatcctgccgccggatattaactccggcctgtaccattttcacgttaacgacgatggcgaaatcgtttatggtatcggcgccatcaaaggcgtcggcgaaggtccgatagaagcgatcattgaagcccgtaatcagggcggctatttccgcgaactgttcgatctctgcgcgcgtacggatattaaaaagctcaaccgccgggtgctggaaaaactgattatgtccggggccttcgaccgcctcgggccgcatcgcgcggcgttaatgaattcactgggcgatgcgctaaaagccgccgatcagcacgccaaagccgaagctatcggtcaggcggacatgttcggcgtactggcggaagagccggagcaaatcgaacagtcctacgccagctgccagccgtggccggaacaggtcgtgctggatggcgaaagggagaccctggggctgtatctgaccgggcatccgattaaccagtacttgaaagagatcgagcgctacgtaggcggcgtacgactcaaagacatgcatccgaccgatcgtggtaaagtgaccacggcggccgggctcgttattgccgcgcgggtcatggtcaccaagcgcggcaatcgtatcggcatctgcacgctggatgaccgttccgggcgtctggaggtgatgttgttcaccgacgccctggataaataccagcagctgctggaaaaagaccgcatacttatcgtcagcggacaggtcagctttgatgacttcagcggggggcttaaaatgaccgctcgtgaagtcatggacattgacgaagcccgggaaaaatatgctcgcgggcttgctatctcgctgacggacaggcaaattgatgaccagcttttaaaccgactccgtcagtctctggaaccccaccgttcgggaactattccagtacacctctattatcagagggcggatgcacgcgcgcggttgcgttttggcgcaacatggcgcgtctctccgagcgatcgtttacttaacgatctgcgtggccttatcggctcggagcaggtggaactggagtttgactaatacaggaatactatgagtctgaatttccttgattttgaacagccgattgcagagctggaagcgaaaatcgattctctgactgcggttagccgccaggatgagaaactggatattaatatcgatgaagaagtgcatcgcctgcgtgaaaagagcgtagagctgacgcgcaagatcttcgccgatcttggtgcatggcaggttgcgcagctggcgcgccatccacgtcgcccgtacaccctggattatgtccgcctggctttcgacgaattcgacgaactggccggtgaccgtgcctatgctgacgataaagctatcgtcggcgggattgcgcgtctggacgggcgtccggtaatgattatcggccaccagaaagggcgcgaaaccaaagagaaaattcgccgcaacttcggtatgccggcgccggaaggctatcgtaaggcgctgcgcctgatggaaatggccgaacgctttaaaatgccgatcatcaccttcatcgataccccgggcgcctacccgggcgtcggtgcggaagagcgcggccagtctgaagcgattgcccgcaacctgcgtgaaatgtcgcgtctgagcgtcccggttatctgcaccgttatcggtgaaggtggttccggcggcgcgctggcaatcggcgtgggcgataaagtgaatatgctgcagtacagcacctattccgttatctccccggaaggctgtgcctccattttgtggaaaagcgccgataaagcgccgctggccgccgaagcgatggggattgttgccccgcgtctgaaagagctgaagctgattgactccatcattcctgagccgctgggcggcgcgcatcgtaatccggaagtcatggccgcctctctgaaagcgcagctgctggccgatctggctgacctcgatgttctgagcgaagaagatctgctgaaccgtcgctatcagcgtctgatgagctacggctacgcctgattatctcactcattttttatccctgagggccggattttccggccctttttttatgtgttgtttactgagacgagatgagatgaataagagctaatgtgattagccgatgatgccgatctcccctaaaactgcagcaactgccagggattgcgacccggcaggccgttaacaaggataaaggagaaatactatggcattgcacaaaaccgtcgcattaagcgccgtggccgcagggatcatgttaagcctgggggccgcacaggccacaccgttgcttggcgcaacggaagcgacaaccatcaaggcgagtgacctggccgcgaaagaaaaagccttaaccgactttccgctcatgacatcggtaaaatcatcgattcaaacgctgccgaacagcgaagttgaaaaaatcgagccgggtctggcgaccaacccggcaaacgtgaagcgcgtggaaagcattctgtccgaaaaggattgggaatatctattcccgatgcgcgcggcagaatatacctactctaactttctgaaagctattggtaaattccctgcagtttgcgggacctataccgacggacgcgatagcgatgccatatgccgtaaatctctggcaaccatgtttgcccactttgctcaggaaaccggtggccacgaaagctggcgcgatattcccgagtggcgccaggcgctggtttatctccgtgaagtgggctgggttgagggtcagaaaggcggctacaacggggagtgtaacccggatatctggcaggggcagacctggccctgcggtaaagataaagacggcgactacctgagctactttggccgcggcgcaaaacagctctcctataactacaactacggtccgttctccgatgctatgtacgatggcgacgttcgtcctctgctggataaaccggagcgggtggcggatacctggatgaacctggcgagcgcggtgttcttcttcgtttacccgcagccgccgaagccctctatgctgcacgtcatcgacggaacctgggtaccaaacgatcatgataaagcgaatggcctggttgaaggctttggggtcaccattcaaattatcaacggcggcgtcgagtgcggcggggcggaagagaacgcgcagtctctgaaccgtattgcctactacaaagagttcgcaaactacctgaaagtgccgattgctgatgatgaagttctcggttgtaagaatatgaagcagttcgatgaaggcggcgcgggcgcgttaccgatttactgggaagaggattggggatggagcccggacaccgctgatggcaagactaacgcctgccagctggtgggctaccagacgccgtatagcgcctttaaacaaggtgactatgcgaagtgcgtccagagccacttcaacgtcaatatcatcgacgacaccggccaggccgaggataccaccccggccacgcctgacgataccacgcctgcgcaggaaactaacgtggcgccggttgcgcgtatcgccggtccgattggcgctatcgaagcgggcgccagggtttccttgagcgcggagggctctaccgatgcgaatggcgataagctcacctatacctggatgtcgcaggacggtcagactatcagcggacaggataaagccgttatcacctttaccgctccggaaaaagatcgcgatgcgcaatatgtggtgagcctgacggtaagcgacgggaccttgtccagcacggcaacgtacaccctgaacgtgaaggctaaagctgctgctgcggatgaaacgaccgatggcaaagacagcgacaccatcagctatccttcctggagcagtacccagacctggaaagcgggcgatatcgttaataaccacggcgcgctgtatcagtgtaaaccgctacctgaaggggcgtggtgcaacgtggcgccgacctactatgagcccggcgcaggcattgcctggggcgatgcgtggaaagcgctgtaatagagataaatccgccagtgcttagcgctggcggggtgatatgatgctttccttaggtaaattcaggaggaaagcgtgaatatcattgcgatcatgggtccccacggcgtctattataaagacgaaccgatcaaagaactggaagccgccctgcaacggcaaggtttccagaccatctggccgcaaaatagcgccgatcttttgcaatttatcgagcataatccgcggatctgcggggttatttttgactgggatgaatacagcgttgatctgtgcagcgatatcaatcgcttaaatgaatatctgccgctgtacgcatttatcaacgcccattcgacgatggacgtcagcagccaggacctgcgcatgacgctatggttctttgaatacgcgctggggctggcggaagagattgctacccgcataggtcaatacacccgcgaatacctcgacaacataaccccgccgtttaccaaagccttgttcaactatgtgcaggaggggaaatatactttctgtacccccgggcatatgggcggctcggcatatcaaaaaagtccggtgggctgtctgttttatgatttctttggcgggaataccctaaaggccgacgtctctatttccgtgacggagctgggatccctgctcgatcatagcggtccgcatctggaggcggaagagtatattgcccgcgcattcggcgccgaacagagctatatggtgaccaacggaacctcgacgtcgaataagattgtcggtatgtattccgctccggcgggcagcaccctgcttatcgatcgcaactgccataaatcgttggctcatttactgatgatgagcgacgtggtgccgctgtggctaaagccgacgcgcaatgcgctagggatcctcggcggcatacccaagcgcgaatttacccgcgacagtattcagcaaaaggttaatgcgacaggcggcgccgggtggcctgtgcatgcggtgatcaccaactccacctatgacggactgctgtataacaccacctggatcaaagagaccctcgacgtaccgtcaatccactttgattccgcctgggtgccctatacccattttcatccgatctatcagggtaaaagcgggatgagcggcgatcgcattgcggggaaagtgatctttgaaacgcagtcgacgcataaaatgctggccgcgctatcgcaggcttcgctgattcatattaaaggcagctatgatgaagataccttcaatgaagcctttatgatgcacacctcgacctccccgagctacccgatcgttgcctccattgagacggctgccgccatgctgcgcggcaactccggcagacgactgattcagcgttcgattgagcgggcgctggattttcgtaaagaggtgcagcggttgcgcgaagagtctgacggctggttttttgatatctggcagccggaagaggtgggggaagcgcagtgctggccggtttcacccggagaaaggtggcatggctttcaggacgccgatgacgaccatatgttcctcgatccggtgaaagtcaccattctgacgcccggtatggacgagcagggcaacatggatagcgaaggcattccggccgcgctggtggcgaagttccttgatgagcgcggcgtggtggtagaaaaaaccgggccgtacaacctgctgttcctgttcagtatcggtatagataaaacccgtgcgatggggctgctgcgcggattgaccgagttcaaacgcgcttacgatctcaatttacgggtgaaaaacatgctgccggatctgtacgccgaagatccggatttttaccgcaacatgcgtattcaggatctggcccagggtattcatcgtctgattcgccagcaccagctctcgcagctgatgcttagcgctttcgacgtcctgccggagatgaaaatgacgccgcatcaggcctggcagcggcagattaaaggcgaagtggaaaccattgaactggagaatctggtcgggcgtatttcagcgaatatgatcctaccgtacccgcccggcgtgccgctgctgatgcccggcgagatgatcgccgaggagagccgcgcggtgctcaattttctgcttatgctgtgctccatcggccgccactatccgggtttcgaaaccgatatccacggcgcgaaacgcgatgaagacggcgtgtactgggttcgagtcttaaaaaatgactaagcgcttgcgcactcacgaactgaacgagtaacgttgttggcttcaactggaggagttgtaccatgctgggtttaaaacgggttcaccatatcgccatcattgcgacggattatgcgaagagtaaagccttctactgcgacattctggggttcaccctgcagggcgagttctatcgccaggagcgtgattcatggaagggcgatctggcgctgaatggcgaatatgtcattgaactcttttcattcccgtttcctcctgcgcgtccgagccgtcccgaagcctgcgggctgcgccatctggcgtttagcgttgatgatgtcgatgccgccgttgcgcatcttgaggcccacggcgtggcctgtgaagacgttcgtatcgaccccttcaccggtaaacgattcaccttttttaacgatcccgacgggctaccgctggagatttatcagcagtaattcttgtcagggcgtgttctgccgggtaacgtgccggacacgctttcctcagttagtactctcatgatgatgatcccagacatggcgcaaacgctacagccgcaccgccattttttagtggcctttagcggcgggctggattcgagcgtgctcctgtatcgcctggtttgctggcgcgaacaggatcctaccgttcagctgcgggcgatgcatattcaccacggcctcagcgcgaacgccgacgattgggtggcgcactgccgacaaatatgccagcagtggcaggtaccgcttttggttgaacgggtggcgctcgccgatgaggggctggggattgaggcccacgcgcgtcaggcgcgctatcaggctttccgttcggcgctattacccggcgaagtgctggtgacggcacagcatcttgacgaccagtgtgaaacctttctgttggcgcttaagcgggggagcggcccaaccgggctttcggcgatggccggcgagtccgattttgccgggacgaaactgctgcgtccgctgcttaacgaaagccgcgactccctgcaccggtgggcgatagcccatcagctcagctggattgaagacgaaagtaaccaggacgacgcctacgatcgcaattttctccgcctgcgaattgttccgctgcttaacgctcgctggccgcacttcgccgaggccgtagcgcgcagcgccagcctgtgcggcgagcaggaacagctgctggatgaaatgctcgcggcggagctggcaacgctggtggcggaggatggcgcgttgactatcgaaccgttggcggccatgagtgcccctcgtcgggccgcgctgctgcgccgctggctggctgggctcaatgcgccgatgccttcgcgcgagatgccggagcgtatctggcgtgaagtggcgatggcgcgcgaggatgcgtatccctgtctgcgccttggccaattcgccgttcgtcgctatcagcaacggctgcactgggtgaaatatctccccggacagagcgagacggtgctggcgtggcgcgatattgccaggccgctgccgttacccgacggccttggcgaactgaagctcctggccggcggcccgttacgcggcccgcgccaggatgaagcggtcactattcgttttcgcgccagcggtaatctgcatatcgtcggccgccagggcggccgcaagctgaagaaaatctggcaggaactcaacgttgcgccctggcggcgcgataccacgccgctgctgttttacggcgaaacgcttatcgccgcagccgatggtctgtttattaccgtcgatgggaaagttcaggaaggtgaaggcgtgcagatgatgtggatgaaaacgggcggctgagccacccgttttgcttcaggactcgctaaccactaccgtaccgatttccggatggctgaagctggcgattttatccaggcgcagttcgcggacgtcaccggcgagctccacgacgagatactcgatatttttgcgcgagataagatcgttggccttcgcttgcagctgttcgccatctttgagctccagcgccaggaccagatggtgctgacaggcaagttcgaggttgtcataatcatcgcaattgatgggttgataagtatcattcattgacataatcgctcaccagtaagtttgccgccgcatatgcggccttttccctgactgactcagcaagggcctgatccgccgcaacctcattcaatactttcaacacgcaacctagcgcatccgggatatacccaaggtccccgctggctatttccgcataccgcttgcgtattaactcacaatatttgtccacatgccctcctgtcagcgttctgacttaaccgtgggatgtaagtttaagcctacgaagataaactctgtttagcaaggtgactataccatagtcatttaagcaatatcagcaggatgaaaggggatcctgcgattgctgacagccttttgccaccagtttcgctacaatgaacgccatttttatcaggagtttcctcatggcgctgaaagcgacgatttataaagcgacggtgaacgtggccgacctggaccgcaaccagtttctggatgccagtttgacgcttgcccagcatccgtcagaaacccaggagcgcatgatgctgcgcctgctggcgtggatgaaatacgccgacgagcgtctgcagtttacccgcggtttgtcttccgatgatgaagctgaactctggctgctaaacgatcatctgggcgttgatctgtggatcgaactggggctgccggacgaacggcggattaaaaaagcctgttcgcgggcgcaagaggtggcgctgtttgcctataatagccgggcggcagaaatctggtggcagcaaaataaaagcaaattggcacagttttcaaagctaaccgtatggtatttagatgatactcagctggcgcagctcagtgcttttgccgatcggacaatgtcgctacaggcgactatccaggatggcgctatctggttatctgacgctaagaataatctggaaattcatttaacggcctggcaaacatccgcatgattacgattagccgcagcgtggcgattgcggatgacgaggtctcactttccgggatacgcgcccagggggcgggcggtcagcatgtcaataaagcatcgacggctatccatttgcgctttgatattaaggcatcgagcctgcctgagtattataaggaacgtctgcttacctccagccatcacttaatttctgccgagggtgtggttatcattaaggctcaggaatatcgcagccaggagatgaatcgcgaagcggcgattgcgcgtctggttgccttaatacaagaattaaccgcagtgcagaagcgccgccgggagacgcggccgaccagagcgtcaaaagagcgccggcttgcctcaaaggcgcaaaaatcctcagttaaggcgctgcgtgggaaagttcgtcattaaaggcatggcgaaccggtggaatggataataaggaatttacagtgaagaaaatcgtattttcagtcgtggctgcatgctcgctttttgccctattcggctgtaaccatcgcgcggagatggacacgctacaaccggcgccgatggaagagctaaagccgatgcagcagagctggcgcggcgtgctgccgtgtgccgactgcgaaggtatcgaaacttcgctctttcttgagaaagacggcacctgggtgatgaacgagcggtatcagggcgtcagtcgcgagccttcctcctttgcttcctatggcacctgggcgcgcacggccgataagctggtgctgaccgacagcaaaggcgagaagtcttactatcgggcgaagggcgacaagctggaaatgctcgatcgcgacggtaatcccatcgagtctacgctgaactatacgcttgagtcagtcaaatccagcctgcccatcacgccaatggcgatgcgcggaatgtacttctatatggcggatgccgcgacctttaccgattgcgcaaccggcaagcgagtggcagtcgcgaataacgcgcagctcgagcgtgattatgccgcggcgcgcggaacggatactcgcccggtgctgctggtggttgaggggcactttacgctggaagcgaacccggattcgggagcgccggttaaagttctggcggtggattcaccaggcaagttttatcaaaaagaagactgtaattctcgttagttaattgagtcctacgagacggcttgtcttgatataaattcccaatttaagatgcccgatatactgcaattgtgtttcgggcttaaagtttgccacgtccccctcacgcatatgaagcaggtctgatgggctaatccagcccggttgagccagggtcagcgggtgtccggccttcgcgaaggcatcgctgacaaactcagaacaaaaccacatttttttgtccccggaaacggcatcgctaagctgcgctttggccaggccattcacgcactgctggcggaaatccttcgaaaagggattcagggagcagagctgtttggttaccataaagggcacaaattcaatgatgccgcgatagttatagccgctgtttctgtttttataggcgaaatttttaatgccggcggcttgttgcggcgtaaggtcaggcgctcttagggcaaacagcttatcgctgtgctgcatcgcttgctggagcggaataatctgcaccccagcgccggttgcctctgcaacctggttatcaccgatatagatagcgacatggccaacggaggatgcgctaaaagcacgaatccccagggacgtcacgccaatgctggaagagaaaaggagatcgccggggagcaggtcttgtgcgttaatttcagtcagcgtgttattagccaccgagctctggcgctgaagtttaactgcccattgctgcgatggtggcttaatagcggaagcggaaggcgcggaccggctgacgtctaccgtgcaggccgaaagtaaaaacaatgcgggaaaaagcaggacataatttgcccattgtttagccatgattacaatccctgtaaaaaagaggctctgaaaccagagcctcttttggcgttaacctttaatttgttgtaccaggtaattcacgatatcgccggttttaatcagctgcttctcgccgctgcgacgatatttatattcaatatcgtcgttgtcgaggttacggtcgcccagcacgatggtgtgcggaataccgataagctccatatcggcgaacatcacgcccggacgctctttacggtcgtccatcagcacgtcgatacccagcgcgctcagctctgcgtacagcttctcggccagctcctgcacgcggtaggatttatgcatgttcatcggcagaatcgcaacctggaacggggcgatagcgtccggccacagaatcccgcgatcgtcaaagttctgctcaatggcggccgccaccacgcgcgtcacaccgataccgtagcagcccatcgtcaggatctggttacggccatcttcgccctgtacggaggctttcatcgcttcagagtacttggtacccagctggaagatgtggcccacttcgataccgcgtttaatcagcagcgtacctttaccatccgggctcgggtcacccgccacgacgttacggatatcagccacttcaggggtggcgacgtcgcgatcccagttgatgccgaagtagtgtttcccgtcgatgttagcgcccgcggcgaaatcgctcattgcggcaacggtacggtcgataatcaccggaatgggcatattaaccgggcccagagaaccgggacctgcctgcaccagcgcgcggatctcttcttcggtagcgaaggtcagcgggctggcgacctgtggcagtttttccgctttaacttcgttcagctcatgatcgccgcgaaccagcagggcaattagcggagacttgctgtcttctaccgctttgaccagcagggttttcgccgttttctcaatcggcagattgaactgctcaaccagctcggcgatggttttggcgttcggcgtatcgaccagcgtcatttcctgagtggcggccgcgcgcggctctttcggcgcaacggcttcggcgaactcaatattggccgcgtagtcggaagagtcagagaagatcacgtcatcttcgccgctctgcgccagcacctggaattcgtgagatgcgctaccgccgatagaaccggtgtcagcctgtaccgcacggaaatccaggcccatacggctgaagattttgctgtacgcggcgtacatcgcgtcgtaggtttcctgcagagattcctgagaggtatggaaagagtaagcatctttcatcaggaattcacgggaacgcatcacgccgaaacgcgggcgcacttcgtcacggaatttggtctgaatctgatagaagttcagcggcagctgtttgtaagagctcagctcgttacgaatcaggtcggtgatcacttcttcatgagtcgggccgagtacgaacggacgttcgccacggtcagcaatacgcagcagttccgggccgtactgttcccagcgaccactctcttgccacagctcagagggctgaactaccggcattaacacctcgattgcaccggcgttattcatctcttcacgcacgatgttttcgacttttttcaggacgcgcacgccggtcggcagccaggtatataacccggaggccagcttgcggatcatcccggcgcgcagcatcagctgatggctgataacctcggcgtcggcaggtgtctccttcagagtggagagcaggtattggctagtacgcatgttgttacggttccatttggacgatcgatacagactgggagccagcctgacacaaaaaagtggtttagtttaccagtgtggcaaagatgccaaaagagaggaaaataaaattagcgtggttcgagagaaaagacttcaaaaccggacgaaatcacccgccagcgcacgttaaaatccagcagccagacggcgtaggtctttcccgggtcttcttctttacgatatgccgggcgcggatcttgcgccagaacttcgctaataaacatcttaagtcggggatagcgcttttccagttctaaaagccgggcttctgtttctggcgtgaagctcaccgccacttccgcctgcggtgcctgctgcgcgtagctcgcgctggcttccggcagcgcttcggcaaagggcaggtaaggtttgatatccacgaccggcgtaccatccaccaggtccagactaccgagttccagaacgacgtgttctttctggcagcgaataccttttagctcgaccagcgacataccgattggattaggacgaaaggtcgaacgggtggcgaaaacgcccatccgcgcattaccgccgaggcggggagggcgcacggtcgggcgccagccgccttccatggtctgatgaaacacaaacaggatccacagatggctgaagttttccaggccacgtacggcatcggcctggttataggggggcagaagatgtaattcgccgccgccgtttttaaccagcccaggctggcggggaacggcaaatttttctttatagggcgagcgaataacgcctatctgcgcaaactgaaaatcactcattgcgccgtaacgttaagcgctgaaccaaggcagacggcctggcggtagcagcccggagttccgctggtcacttcgcagcggtgcagcagcacggcattggctttcatttttgccgcgttaatctgcatgcgcttgcgcgccgtcgggatattgggcggagagtcttgattcgaggcctggcatgattcaccggtgacttcgccgagttcgcggaaaggtttacccaccaattctgttgcatcggtatagattcttaccggggccggacgcgtcgctttcggttttgccggttccgatttggcaggcggggttacggtgctttgtacaggctcgacgggagatctgcttagcatagaacaaccgcttaacatgagtgctaacaaacagaccggtaaagcacgcatagtatttcctcaataaataataaaacagggcgctattgaatcaggtgcttgcataaatgacaagacgggcataaagcccgtcctgaatgatattacgctgagaaaagattaccagcctttcaccgcaccgccgttaaagattttgttagccgcttcgtaaacttcatcactctgataggcctgaacaaatttcttaacattttccgcatctttgttgtcttcgcgagcgacaatcagattcacgtacggagactctttaccttccacaaaaataccgtcttttgccggcgttaagccaatctggctggcataggtggtattgataaccgccagagcgatttgcgcatcatccagagagcgcggcagctgcggggcttccagctcaacaattttcaggtttttcgggttttcaataatatccagagaggttggcagcagaccaacgccttctttcagtttgatcaggccaacctgttgcagcagcagcagagagcggccaaggttggtgggatcgttaggaatcgcaacctgagagcccggctgcagttcgtccagcgatttgatttttttcgaataacccgcaatcgggtaaacaaaagagttacctacggaaaccagcttgtagccgcggtctttgatttgctggtcaagatacggtttatgctggaaggcgttaacgtcgatatcgcctttgctcagcgcttcgttcggcagaacgtagtcgttgaaggtcaccagttcgacatcaaggccgtatttttcttttgctactttctgcgcgacttccgcaacctgctgctccgcaccgacgataacgccgactttaatatggttaggatctttttcgtcctgaccgcaacccaccagagccagagaaccgattaacgcgccgactgccgcaaaggttttgaaattaaaggccatgttatttccttcctgtaagattctgtattgtgtgtaatgttatttgtgagtcacagcccggacgatacgatcgcctgagaattggattaagtacaccagaataaccagcagcaccagtacggtattcattaccgttgcattgtagccgatataaccgtactgatagccaatctgcccgagaccaccggcacccacggcgccgcccatcgcggaatagccgaccagcgtaatgagcgtgatggttgccgcattcaccaggcccggcagcgcttccggcagcagaaccttacgcacgatctgcatcggcgttgcgcccatggcgcgggatgcttcgataaggccggtggggatctccagcagggcgttttccaccatacgggcgataaacggcgcggcgccgaccgtcagcggaacgatagccgcctgcaggccgatcgacgtgccaacgatcacgcgagtgaatgggatcatccacaccagcaggataataaaaggaatcgagcggaaaatattcaccaccgccgaaagcgtgcggtagagcttcgcattagcgacaatttgccccggacgggtgacgtacagcagcacgccgaccggcaggccgagaacaaaaccgaagaagccggagacaaacgtcatggccagcgtttcccatacgccgcgaaccagcagccaaatcattggttcagacatatcccagtacctctacttttacatggtgttcctgtagccaggcgattgcggcctgggtatcttcctgcgtgccgtgcatctcagtgagcataatgccgaacttgacgccgcccgcgtaatccatctgcgcactaataatgttgttattcacattaaaacgacgggcagtctcagaaagaagcggggcatcaacggagtgacccgtaaactccatgcgcagcatgggcacgctatcgggaagcgcttcaggtttaaggcgggcctgataatcatccgggatatcaaggtgcagcgttgactgaataaactgttgcgccagcggggttttgggatgagagaagacctcactcaccgtatcctgttcaatcagctggccgttgctgataacggcaacgcaatcgcagatgcgtttgacgacatccatttcatgggtaatcagcaaaatcgtcaggcccaggcgacggttgatatctttcagcagttccagaatcgaacgcgtagtggccgggtccagagcgctggtggcttcgtcgcagagcaggacttttggattgctcgccagcgcacgggcgatggccacgcgctgtttttgaccgccggagagatttgccggatagctatcgtgtttatcccccagaccgacgagatcgagcagctcggtcacccggcgcttgatttcatctttcggcgtattgtcgagctccagaggcaacgccacgttgccgaatacggtgcgtgaggcaagcaggttaaagtgctggaagatcatgccaatctggcgacgggcgcgagtgagctctttttctgacagcgccgttagttcctggccgcccacctgtacgctgccctgcgttggacgttcgagcaggttaacgcagcggattaacgtacttttacccgcgccggaagcgccgatgacgccataaatttgcccggcggggacatgcaggctgacatcgttcagcgcctgtatgctgcgatttccctgctggaacactttggtaatattcgaaagtttaatcatcagttatttattatcgtttagccgtttgccgtggcattttcttctgccgtgtccaggcgatgcctgtcaatgaaatggatgttaaggcatccagacgtctaaatcaatctgactctgtataatgagcactttcttgcgtccggaaacatgcgatactacgcgcattagcctttatcaggagcaaaccggtggcaatgtcagtacccgcaatttttcttgaccgtgatggcacgattaatgtcgatcacggctatgtccatgaaatcgacaactttgaatttatcgatggcgtcattgacgcaatgcgtcaattaaaggagatgggttacgcgctggtgctggtgaccaaccagtccggtatcgcccgcggtaagtttactgaagagcagtttgaaacgctgacggagtggatggactggtcgctggccgatcgcggcgttgatctggatggcatctattattgtccgcaccacccgcagggaaccgttgaagagtttcgccagacctgcgactgccgcaagccgcatccgggtatgctgatttcggcgcgcgactatctgcatattgatatggcggcttcctttatggttggcgataaagtcgaagatatgcaggcagctctggcggccaatgtcggcacgaaagtattagtgcgcaccggcaagccgatgaccccagaagccgaaagtgccgctgattgggtgcttaatagcctggcagacctgccggatgctatcaaaaagcagcaaaaataagcgttatgtataaaaggtgagcggttgaaataaaattgcattttaccgcttgtcaccgccgaataactccctataatgcgctcccactgacacggcagatgtgaatcacttcacaaacaaccgggtcggttgaagagaaaaaatcctgaaataacgggttgactctgaaagaggaaagcgtaatatacgccacctcgcaacggtgagcgaaagccgcgttgcactgctctttaacaatttatcagacaatctgtgtgggcactcaaagtgacatggattcttaacgtcgcaagacgaaaaatgaataccaagtctctgagtgaacacgtaattcattacgaagtttaattcacgagcatcaaacttaaattgaagagtttgatcatggctcagattgaacgctggcggcaggcctaacacatgcaagtcgaacggtagcacagagagcttgctctcgggtgacgagtggcggacgggtgagtaatgtctgggaaactgcctgatggagggggataactactggaaacggtagctaataccgcataacgtcgcaagaccaaagagggggaccttcgggcctcttgccatcagatgtgcccagatgggattagctagtaggtggggtaacggctcacctaggcgacgatccctagctggtctgagaggatgaccagccacactggaactgagacacggtccagactcctacgggaggcagcagtggggaatattgcacaatgggcgcaagcctgatgcagccatgccgcgtgtatgaagaaggccttcgggttgtaaagtactttcagcggggaggaaggtgttgaggttaataacctcagcaattgacgttacccgcagaagaagcaccggctaactccgtgccagcagccgcggtaatacggagggtgcaagcgttaatcggaattactgggcgtaaagcgcacgcaggcggtctgtcaagtcggatgtgaaatccccgggctcaacctgggaactgcattcgaaactggcaggctggagtcttgtagaggggggtagaattccaggtgtagcggtgaaatgcgtagagatctggaggaataccggtggcgaaggcggccccctggacaaagactgacgctcaggtgcgaaagcgtggggagcaaacaggattagataccctggtagtccacgctgtaaacgatgtcgacttggaggttgttcccttgaggagtggcttccggagctaacgcgttaagtcgaccgcctggggagtacggccgcaaggttaaaactcaaatgaattgacgggggcccgcacaagcggtggagcatgtggtttaattcgatgcaacgcgaagaaccttacctactcttgacatccagagaacttagcagagatgctttggtgccttcgggaactctgagacaggtgctgcatggctgtcgtcagctcgtgttgtgaaatgttgggttaagtcccgcaacgagcgcaacccttatcctttgttgccagcgattcggtcgggaactcaaaggagactgccagtgataaactggaggaaggtggggatgacgtcaagtcatcatggcccttacgagtagggctacacacgtgctacaatggcatatacaaagagaagcgacctcgcgagagcaagcggacctcataaagtatgtcgtagtccggattggagtctgcaactcgactccatgaagtcggaatcgctagtaatcgtggatcagaatgccacggtgaatacgttcccgggccttgtacacaccgcccgtcacaccatgggagtgggttgcaaaagaagtaggtagcttaaccttcgggagggcgcttaccactttgtgattcatgactggggtgaagtcgtaacaaggtaaccgtaggggaacctgcggttggatcacctccttaccttaaagaacctgcctttgtagtgctcacacagattgtctgatgaaaatgtagcagtaaaaaatctctgcaggcttgtagctcaggtggttagagcgcacccctgataagggtgaggtcggtggttcaagtccactcaggcctaccaaatttctgctgatgctgcgttgcggcgacactcacatactttaagtatgcttcgtgtcaccacgccttgcctcaacagaaattaaggttgatgagatttaactacgatggggctatagctcagctgggagagcgcctgctttgcacgcaggaggtctgcggttcgatcccgcatagctccaccatctttactgcacaacacaagaaaacttcagagtgtacctgaaaaggttcactgcgaagttttgctctttaaaaatctggatcaagctgaaaattgaaacgacacactgttcaagtgtgttcgagtctctcaaattttcgcgacacgacgatgttttacgaaacatcttcgggttgtgaggttaagcgactaagcgtacacggtggatgccctggcagtcagaggcgatgaaggacgtgctaatctgcgaaaagcgtcggtaaggtgatatgaaccgttacagccggcgatgtccgaatggggaaacccagtgcaattcgttgcactatcgttaactgaatacataggttaacgaggcgaaccgggggaactgaaacatctaagtaccccgaggaaaagaaatcaaccgagattcccccagtagcggcgagcgaacggggagcagcccggagtctgaatcagcttgtgtgttagtggaagcgtctggaaagtcgcagggtacagggtgatactcccgtacactaaaacacacaggttgtgaactcgaagagtagggcgggacacgtggtatcctgtctgaatatggggggaccatcctccaaggctaaatactcctgactgaccgatagtgaaccagtaccgtgagggaaaggcgaaaagaaccccggcgaggggagtgaaaaagaacctgaaaccgtgtacgtacaagcagtaggagcccactgggttgggtgactgcgtaccttttgtataatgggtcagcgacttatattctgtagcaaggttaaccgtataggggagccgcagggaaaccgagtcttaactgggcgttaagttgcagggtatagacccgaaacccggtgatctagccatgggcaggttgaaggttgggtaacactaactggaggaccgaaccgactaatgttgaaaaattagcggatgacttgtggctgggggtgaaaggccaatcaaaccgggagatagctggttctccccgaaagctatttaggtagcgcctcgtgaactcatcttcgggggtagagcactgtttcggctagggggtcatcccgacttaccaacccgatgcaaactacgaataccgaagaatgttatcacgggagacacacggcgggtgctaacgtccgtcgtgaagagggaaacaacccagaccgccagctaaggtcccaaagtcatggttaagtgggaaacgatgtgggaaggcccagacagccaggatgttggcttagaagcagccatcatttaaagaaagcgtaatagctcactggtcgagtcggcctgcgcggaagatgtaacggggctaaaccatgcaccgaagctgcggcagcgacactatgtgttgttgggtaggggagcgttctgtaagccgttgaaggtggcctgtgagggttgctggaggtatcagaagtgcgaatgctgacataagtaacgataatgcgggtgaaaaacccgcacgccggaagaccaagggttcctgtccaacgttaatcggggcagggtgagtcgacccctaaggcgaggccgaaaggcgtagtcgatgggaaacaggttaatattcctgtactcggtgttactgcgaaggggggacggagaaggctatgttggccgggcgacggttgtcccggtttaagcatgtaggcggatgttccaggtaaatccggaacgtcactaacgctgaggtgtgatgacgaggcactacggtgctgaagtgacaaatgccctgcttccaggaaaagcctctaagcatcaggtaacatcaaatcgtaccccaaaccgacacaggtggtcaggtagagaataccaaggcgcttgagagaactcgggtgaaggaactaggcaaaatggtgccgtaacttcgggagaaggcacgctgatggtaagtgaagcgacttgctcgtggagctgaaatcagtcgaagataccagctggctgcaactgtttattaaaaacacagcactgtgcaaacacgaaagtggacgtatacggtgtgacgcctgcccggtgccggaaggttaattgatggggttatcctcgcggagaagctcttgatcgaagccccggtaaacggcggccgtaactataacggtcctaaggtagcgaaattccttgtcgggtaagttccgacctgcacgaatggcgtaatgatggccaggctgtctccacccgagactcagtgaaattgaactcgctgtgaagatgcagtgtacccgcggcaagacggaaagaccccgtgaacctttactatagcttgacactgaacactggtccttgatgtgtaggataggtgggaggctttgaagtgtggacgccagtctgcatggagccatccttgaaataccaccctttaatggctggtgttctaacgtgggcccgtaatccgggttgcggacagtgtctggtgggtagtttgactggggcggtctcctcctaaagagtaacggaggagcacgaaggtcagctaatcctggtcggacatcaggaggttagtgcaatggcataagctggcttgactgcgagcgtgacggcgcgagcaggtgcgaaagcaggtcatagtgatccggtggttctgaatggaagggccatcgctcaacggataaaaggtactccggggataacaggctgataccgcccaagagttcatatcgacggcggtgtttggcacctcgatgtcggctcatcacatcctggggctgaagtaggtcccaagggtatggctgttcgccatttaaagtggtacgcgagctgggtttagaacgtcgtgagacagttcggtccctatctgccgtgggcgctggagaattgaggggggctgctcctagtacgagaggaccggagtggacgcatcactggtgttcgggttgtcatgccaatggcattgcccggtagctaaatgcggaagagataagtgctgaaagcatctaagcacgaaacttgccccgagatgagttctccctgactccttgagagtcctgaaggaacgttgaagacgacgacgttgataggccgggtgtgtaagcgcagcgatgcgttgagctaaccggtactaatgaaccgtgaggcttaaccttacaacgccgaagatgttttggcggatttgagaagacaacaatttcagcttagattcagagttgagtacgcgataaagaattgcgtactgagcacaaagaatttgcctggcggcactagcgcggtggtcccacctgaccccatgccgaactcagaagtgaaacgccgtagcgccgatggtagtgtggggtctccccatgtgagagtagggaactgccaggcatcaaattaagtagtaagccggtgcataaatccggtggttacagaagtattcggtggagcggtagttcagtcggttagaatacctgcctgtcacgcagggggtcgcgggttcgagtcccgtccgttccgccacttattaaaagccctgagcatttgctcagggctttttctttgcctgtcgctttattattgcttttttagcaaaaatcctctgcgtttagcgctctttttctcaatcctctcgttggtcataattaccctcgttaaccgatatgaatgaataaagaggaaaatcatgacaatccctgcatttggtcttgggaccttccgtctgaaagatgacgtggttattgcatctgtaaaaacggcgcttgagctgggctatcgcaccattgataccgcgcaaatctatgataatgaagctgctgtgggtcaggctattgctgaaagcggcgttgcgcgcgatgaactgttcatcaccaccaagatctggattgaaaatctcagcaaagacaagctgatcgccagcctgaaagagagcctgctgaagctgcgaactgactatgtcgacctgacgttaatccactggccgtcgccaaacgatgccgttgccgtcgaagagtttatggccgcgctgctggaagcgaaaaagcaggggctgacccgtcagattggtatttctaacttcaccattccgctgatggagcgggcaattgccgccgttggcgcagagaatatcgcgaccaaccaggttgaactctctccgtacctgcagaaccgtaaagtggttgattgggcgcgtgaacacgatattcatatcacctcttacatgacgctggcctacggtaaggcgctgaaagatgaagtgattgcacgtattgcgacgaaacataatgccacgccggcacaggttatcctgacctgggcaatgggcgaaggttatgcggtaattccgtcttcgacgcggcgcgaaaacctggcaagcaaccttaaagctcaggatctgcagcttgatgaagacgatcgccaggcgatcgccgccctggactgcaacgatcgtctggttagcccggacggtctggcgcctgaatgggactaatctaatccccctctgtactctacaaccctcttacagctccttcgggagctgttttacatgttcgctaagaaagtcgataaaggctctgatccgcgtgcttacggctctgtcgctgtagtaaaccgcgctaaacggcatttcaaccggcagccgtttatcagccagcagttcgacaaacgtcccttcagcaatttccttatccaccatatagtccgacagacaggcgattccgttaccggccaggcacagctgcttgagcgtttctccgctattggaagatatctcgctttcgatttccagcagctggccatcgcagcaggagactggccaggtattcaatgaaacaggttcgctaaaaccgaggcattgatgattttttagctcagcgacgctttgcggcgtgccatggcgagcaagatagtccggtgaagcgattattttgcggtagctattaaacaatggcctggcgcgcaggctggaatcggtcagcgtgccggcgcggatcgcgacgtcaactttccgctcaatcagattgataaaggtttcggacgagaccagcgtaaggctcatctctggataacgctcgcggaagggttttatcaacggcatcagaaaatgcagtatcaccggcgtcgcggcatcaacccgtaatagtcctcttggcgtcgtacgactctccagaagttcattttcggcagcggccatctcctgaagcacaacctgcatgcgacggaaataacgttctccttcttcggtcaggcttagctgacgggtcgtacggttaagcaggctcacgccgagctttgattccagctttttcaccgcccggctgacggcggaattggcctgacctagctgttccgctgcgcggctaaagctgccgctctcgaccacggcgacaaaaatggcgatttcttctgaggtagctctcattattgcacctgtggcaaaattctattgatactttggctatttttgttattaaagcatctcttcatactacgtgtcatcttaatcatgttgatacggagtacattatgccgctggcgctacttgccttaactatcggtgcctttgctattggcacgaccgaatttgtcattgtgggcctggtgcccaccattgcagaacaactcgctatttcgctaccctcagcggggctgttggtttctatctacgcgctcggcgtggcgattggcgccccggtgctcaccgcgctgaccgggcgtatgccgcgtaagcaactgctgctggcgttaatggcgctgtttaccgccggtaacctgctggcctggcaggcgccgggttatgaaactctggttctggcacgcctgctgacgggactggcgcacggggtattcttttcgatcggatcgacaattgcgaccagcctggtcccgaaagagaaagcggcttcggcgattgcgattatgtttggcggtctgaccgttgcgctggtgaccggcgtaccattgggcacctttatcggccaacactttggctggcgcgagacgttccttgccgtgtcgatccttggcgtaatcgcgttaatgagcagccttatcctggtgccgaataacattcccggtcgtgtcagcgccggtttgcgcgctcagctccaggttctgactcatcctcgtttactgataatctatgccattacggctttgggatacggcggcgtattcaccgcttttaccttcctggcgccgatgatgcaggatcttgccggatttagcccggcggccgttagctggatcctcctgggctacggtgtttctgtagcggtgggcaacgtatggggcggaaagctggcggataagcatggcgccgtgcccgcgctgaagctgatttttgccgccctggttgctttactgctgatctttcagtttacggccagcattcagtatgcggcgctggcgacggtactggtgatgggcatcttcgcattcggtaacgttccgggtctgcaggtatacgttgtgcagaaagcggagcagtatactccaggcgcggttgacgttgcctcaggcctgaatattgccgcctttaacatcgggattgccttaggatcggtgattggtgggcagacggtagaacattatggtctggatcagacgccctggattggcgcgctgatagttctggtcgcgctgttgctggtggttcttagcggccggctcgataagcctcagcgctgtgctacggttctttccgtagaaggataaaggtttctggcaaattgcattgaaagtgtatacaaaaatccctataacagaaggaccagctgcagtctcgggctggtttcctgttatcgaggtttgatgcctaaattgcgaaagaatacctatgccatgcgctacgtcgccggacagcctgcggagagaatcttacctccggggtcgtttgctggcatgactccggcttttccggcgggagtaccgttaagttcggatgaaaaaatccgcgtactggtgtggaacatcttcaagcagcagcgcgccgagtggaaatcagttcttaacaactttggtaaagatgcgcacctggtgttattacaggaagcgcaaaccacgcctgagttagtgaaattcgccacctccaattatctggccgctgaccaggttccggcactggtgcttccgcagcatccttccggcgtgatgacgttagcttccgcccaccccatttactgctgcccactgcgcgagcgcgagcctatcctgcggctggcaaagtcagcgttggtcaccgtttacccgttaccggatacccggctgctgatggtggtaaatatccacgcggtcaactttagtcttggcgtggatgtctacagcaagcagctgctgccgattggcgaccagattgcccatcacagcgggccggtgataatggcgggtgactttaacgcctggagtcgtccgcgaatgaacgctttgtatcgctttgcgcgtgaaatgtcgctgcgcgaagtccgcttctctgacgatcagcgccgccgtacttttggccgcccgcttgattttgtgttctaccgggggttaagcgtgcacgatgcttccgtgctggtgacccgcgcgtccgaccacaacccgctactagttgaattcagtcccggcaagcctgattaattaaggtatgtcaggcctgccatgggggcaggcctgcgtatgcatggtgctgcctttattactcaaaaaaccgaaggacaatgcaatgacaacacgctctcatcatgacaacgtcgaaaaacagtttggctcacaggccagcgcctacctgagcagtgccgtacacgcttctgggcgcgatctgcagcgcctggccgaacggctggcggacttccctcaggcccacgtgctcgatatgggatgcggtgccggacacgccagctttgcggcggcagggcaggttgcccaggtaacggcatatgatttatccagccaaatgctggaggtggtggctcaggccgcaagggataaaggttttgctaacattgccacgcagcagggctatgccgaatctttgcctttcgctgatgccagctttgatgtcgcgatcagccgttattctgcgcatcactggcatgatgtcggccaggcattgcgcgaagtgaagcgggtgctgaaaccgggcggagtgatgattattatggatgtgatgtcgcccggccatcctgttcgcgacgtctggctgcagacggttgaggcgctgcgcgatacctcccatgttcgcaactactccagcggcgaatggctgacaatggcgagtgaggccggtttggtgataaatcatctgctgaccgatcgcctgcctctggagttcagctcctgggtcgcgcggatgcggacgccagaggcgctgacggaagcgattcgtttataccaggagagcgcatcggcggaggtcaaagcctattttgcattgcagcaggatggttctttcaccagcgatacgattatgtttgaggcccataaggccatctgacgcagagataaaacaaaaggcaccgcatgggtgccttttttaatgcctgctgaatcatcaggattctggtctgtcgctatttttcacaaacagcgtcagctgatcgccgggtttcaggttgccggtatcgctgttccagcgcatcacatcgcgaatgttcacgccatggcgtttcgcaatgctcgacaaagagtcgcccttacgcacgcgataggtaatgctatcgctattgtttgccagacgttcagcgctgctgcctgcgccaatcaccagattctgaccgaccttcaggttagaaccgcgaataccgttccactgctgcagatctttcgttgatacgccgagacgcgatgcaatgccggagatggtgtcaccggagcgcacctggtagctgcggctggtcaacggcttgttgtcagccagcagcgtcggctgcacggcggcaatatcaccggaggccaaagactcacgcagctgcgccgcatgcttctgcggtaccagtacgtaattcggcccgttcgcgcccagagtcgaccccttaacgcctgcattgaacgttttcagcttgctgacgggcattcctgccatatccgctagctgtgaaatctcaaccggactgtcgagacgtacacgcgccagggcacggctttcgtctgctgtcggcagccttacgccataccgcttgctgttcttgagaatatcgctcagggccagcatttttggtacgtatattttggtttcctgtggtaatgacagcgaccagaaatcggtgggtttaccccgtgatttgttcgctttgatagccttcattacccgaccttcaccgctgttataggcagcgacggttaacaaccagtcgccgtcgaacattttgttcagacgttgcatcatgtttaacgctgccgtggttgaggcaacgatgtcacgacgcgcatcgtaactgcgggtctgtttcaaaccataattgcgcccggtgctcggaatgatctgccaaatgcctgcggcattggcgccagacgttgcgtgcgggtcaaaagcgctctccactatgggtagtaataccagttccattggcatgttacgtttcttaacttgcccggctatccagtacatatacggctctgcccgtaaagttacatcgtggagatagctcttatttcttaagtacttctgtttttgttcgcgaatccggacgttttccggaattcccatctttagctcgtcgcttattgaagtccacagatcctggtcttgcgcgtagaaggttccatcatctaaccagcgcgctcgacttgtgaacttgcttgcttccccttgactcgctgcagaaaggctctgtgcgtgctgttgtacggtgccatcgttcttagacgcttggcaccccaccagcaggacagaggcgagtaaaatcgctcgtgccttcatgtgtgtgtcaatagttgcttaaaagacgagcaaggataacggtgaagtcgtctgaagacaagaattaaatatcagaagtcgtctttctttgaccttaaccaggcaaatcgctgaatagagtgttgcaaatttgtttctttgtctatttctttaattaaatcatcatcatccgttcgaagaaataaattaataagacgctcatttttcagagttacggggagtgttttttggttttttgtacgtaactcattaactttgcggtagtaatcgtttatctccctatcatggggaaggatgcttattgcaaacttcatgtttgctaaagtgtactcatgtgcgcaacatattaatgtttcgtcaggaagggcgccaatcttcttaaatgattgatacatctgctctgcggtcccttcgaagagtctgccgcagccgccggaaaacattgtatcgccacaaaatagataaggtgcgctgtagaaacagatgtgtcctaaagtgtgacctggcgtggcaaaaatagaaaattcgcggcccaaaacagtgaggctatctccgtccttcacgacgtgggttgcgcccttatcctgggtttctgccggtccgtaaaccaccaggttcggaaatttttcccgcagttgtttaacgccgccaacgtggtcgcggtggtgatgcgtcaacaagatggcttccggctgccagcggttttgttcgatggcggtgagcacgggcgcggcttctccgggatcgactatcaggcagcgcccgctatcttcactaagaacccagatgtagttgtcctgaaatgcgggaatactgataagattcataaattacctctaatgcgtagcggaaggttgcgatgaagccggcaaggatacctcatacagttacagcgccagagcactggtccagcatgccgtggggcgaatactaccgcgaatcgctggaacggcagatgaaaccgtggctcgctaaattatatggctttcatttacttaagattggcaatctgagcgcggaaatcaataccgaagcctgcgcgatttcccatcaggtgaatgtctctttgcaggggaatcctgtgcaggtaaaggccgatccgctgcatttgccttttgccgaaaagtcggtagatgcctgcctgctggcgcataccttaccgtggtgcagcgatccgcatcgactgctgcgggaagcggaccgggtgctgattgacgatggctggataattttaaccagttttaatcctgtaagcctgatggggttacgtaaactggtgccggtgttacgcaataagcccccctataacagccgcatgttcaccttaacgcgtcagatggactggctggggttgctgaattttgaagttatgcactacgggggctatcaggtccttccctggtcgcgccacggggggaaaatgctcagcacgcatctaccggcgttgggatgtctgcagctcattgttgcccgtaaacgcactatcccattgacgctaaacccgatgaaatcgggcaaagcaaaaaaacggataccgcaggcggtaggcgccacgcgtcagtggcgcaagggggagaattaactttctgcctgataaccgatgtcgtcccgggttgggttagatgccgccgagcgcgccagttcgtcgcaacgttcgttttccggatgtccggcgtggcctttaacccattcccattttatcttgtgttgacccagcgcggcgtccaggcgctgccagagatcgacattttttaccggtttcttgtcggccgttttccagccgcgttttttccagttgtggatccactgcgtaatcccctgacgcacatactggctgtcggtactgaggatcacttcacaatgttctttcagcgcttccagggcgacgatggcggccatcatctccatgcggttgttcgttgtaaggttaaagccttcgctaaaagttttttccttcccgcgatagcgtaaaatcgcaccgtagccgccaggacctggatttcccaggcaagaaccatcggtgaaaatttctacctgtttgagcatctctggtagacttcctgtaattgaaatcgatacgtaaaacggtaagtctgacataaatgaccgctatgagcactgcaattacgcgacagatcgttctcgataccgaaaccaccggtatgaatcagattggtgcgcactatgaagggcacaagataattgaaatcggtgcggtggaggtgatcaaccgccgcctgaccggaaacaacttccacgtctatttaaagccggaccggctggtggatcctgaagcgtttggcgtccacggtattgcggacgaattcctgatggataagcccgcgtttggtgatgtggtcgatgagtttctcgactatatccgcggcgcggagctggtcatccataacgcatcgttcgatatcggctttatggactatgaatttgctaagctgaatcgcggcattccgaagacggataccttttgtaaggtgaccgatagcctggccctggcgcgtaaaatgttcccgggcaagcgtaacagccttgatgccctctgttcacgttatgaaatagacaacagcaagcgaacgctgcacggggcgttgctcgatgcccagattctggccgacgtttatctgatgatgaccggtggccagacgacgatggctttctcaatggaaggggaagggcagcagcaggccggagaaataggcattcaacgcgttgtgcgcgccgccagcaaattacgggtggtttacgcctctgatgaagagctgatgaaccacgagtcgcggctcgatctggtgcaaaagaaaggcggaagctgcctgtggcgggcctgatttacccataaacgcgctaaaaatagtctgttgggtgatttttgcagcaagcgattcaaaaatgaagaaaaagcgttgacggagtagaggggaatccgtaatattcgcctcgtccccaagggaacagtaagtggagcggtagttcagtcggttagaatacctgcctgtcacgcagggggtcgcgggttcgagtcccgtccgttccgccactattcagaaagcctgaatcagcaatgattcaggctttcgtcgttttagcctgcagaacacattctcttccccgtcttcgccagccatccgtcgcgccgggctgacaacgtttgcccgcgagcctggtgttaacagcattcatattcttgttccgcgctgcgggcgtttacctgcagggctctgggcgagcgggcgggatagcgctggtttgaggcataaaaagggagcctgggctcccctgccaggctggctttagctgagcgtgaaggggtcagcgtcctgccaggccggaaacttctcgcgatactcttttagcgacgtcagcgaaagctcagcatccaggcgagtcgcctgatgcggttcggccgtcgcgataatctcaccctgcggcgtgattatccgactatcgccccggtaatggtgcccgttgccatcggtgccgacgcgattgcatccggcaacataagcctgattttcgatagctctggcgaccagcagcgactgccagtgcattgagcgcagggcgggccagttggcaacatacagcgctaaatcgtagtcgttatggttgcgtgaccatacggggaagcgcaggtcgtagcataccagcggcagaattctccagccgcgccaggcaaaaatgacccgctcgttacccgctgcgtaatgatgatgttcatccgccatgcgaaacaggtggcgtttgtcatagaaatggattttaccgccgggctcaaccagcaagaagcggttaaccggaccgcggtccgtttgcagcgcggcgctaccggcaatcagcgcgttggtttggtcggctttagcctccatccaggctaccacttcctcttgcgacagcgactgttttgctgcttccatcgcgaaaccggtggtgaacatttcgggtaaaacaatgaggtcacgcccggtaatcccttccagttgacgatcgaaatggcgcaggttggcgggaccgtccatccacaccagcggttgttgtaaaagggtaattttcagtccgggcacggtggtgaactccagtatgatgagaggaattataatgactttaacaccatatcagccgatggacggctcagggaatattttgtaaaagaatgacagccctggaaataccttccgctgaattgtcagaaaaaaagagaggcggggaagtccccgcctcgatcgtgatgggtttatttttcgtttttaagccgcttcgatcttgcgcactttctccggtagctttaccgggcgggtcgccagttcatccggggcgaaatcgtcgacgttaatgctgcgcagtcggctggtttccgcacggaccaggatgtccgcctcgtcctgattgattaacccttttgccagcgcgttgcgggccagttcatcaagacgcgtaaacgacagattcttgcccagctctttgcacaggcgctggtggatagggtctgctgccataacatcaagcagcgcttcttccagcaggccaaccggattatgctcgctcggcgtcagatactgaccgcggccgatacgcgaacgcgtcgcgctcggaacctgcaggattttcgctaccttatgatccagcttgtctgaaggcgccaggtaatgacgtccggtcgggaagattgccacgcgaagcgccccagcgaccagacgattcgggaagttcaccaacagatcgtcaatcgactgctcggcctgatacagcgcatcctgcaccccccagtgaaccagcggtaagtccgcttcgttacgcccctcatcgtcatagcgtttcaggaccgccgacgccaggtagagctggctcagcacatcgcccagacgcgcagaaattctttcacgacgcttcagactaccgcccagcaccgccattgagacatcggacagcagagccaggttggcgctcagtcggttcatatgttgatagtagcgacgagtggcatcgcgggtcggcgagctgctggtgagaccgcgggtcaggcccagccagaaactgcgtaccttattgctgcccacgtgcccgatgtgtttaaacagcagcttatcgaaagcgttaacgtcgttattctgcgcggccgccatttcatccagcacgtacggatggcaacgaatcgcaccctggccgaagatcatcatgctgcgggtcaggatattcgccccttcaacggtgatggcgatcggcgcgccctgataggcccgcgccaggaagtttccggtgccgagcataatgcccttaccgccggtaatatccattgcgtcaataatggaacgctgaccacggtgagtacagtgatacttcacaattgccgacagtaccgctggtttttcgccaagcataatgccgtaggtaatcagcgaggcggcggcatccattacgtaggcgttgcctgcgatacgcgccagcggttcttcgatcccttccattttaccgatagagattttgaactggcggcgaatgtgcgcgtaggcgccggtagccatggcgacggatttcaggccgccggtagcgtttgacggcagggtgatgccgcgtcccacggataaacactcaaccagcatccgccagccctggccggccatcgacgggccgccaataatgtaatcgataggaacgaaaatatctttcccctgggtcgggccgttctggaacggaacgttcagcgggaaatggcgacgcccgatttcaacgccgggggtgctggtggggatgagcgcgcaggtgatgcccagctcctcttctccacccagcaggcggtctggatcggagagtttaaacgccagccccagtacggtggcgataggcgcaagggtgatatagcgtttgttccaggtcaggcgcatacccagcacctgctggccctgccattcgcccatgcagacgacgccggtatccggaatggcgccggcatctgaacccgcttccgggctggtcagcgcgaagcacgggatctcctggccgcgagccaggcgcggcaaatagtggtttttctgttcttcggtaccgtaatgctgcagcagctcgcccgggcctaatgagttcggcacgccgacggtaatcgccaggatcccggagacgcccgacagcttttgcaggacgcgagcctgcgcgtaggcggagaattccagcccgccgtactctttcttaatgatcatcgcgaagaagcgatgctctttcagataggcccacagctccggcggcagatcggccatctcgtgggtaatttcgaagtcgttcgccatacggcaggcttcttcgaccgggccgtcaataaaggcttgttcttcagcggtgaggcgcggctgcggatagttgtgcagtttctgccagtccgggttgccgcggaacagatcgccttcccaccaggttgtgccagcgtcaatcgcttctttctcggtgcgcgacatcggcggcatgaccttacggaaagcgcggaacgccgggactgaaatcatggatttacgcatcggcgcaaggttaaacggcagtaaaacgatcgccagcggaatcagcagccagatattccacagccccgcagcgccgagcgcggcggtccagataagcaaaatcgcgctgctcagcagcagattgattcggtgatagaagagcgcaccgagtaaaacaacggttgcaacaatactcaaaatcatcatagagaaatgctccctgtcttgtaggaggtctgaccacttgtgatgatatggttgtagtggatgtaatttgttttagcaatgtgtttacaaaataattacaaccttgctcacattgttgtacggaaatgcggcacataaaatcaaaagcacaggggattgcatcgcgtgctgcttctcgctgcgtcggctatccggtaaactgcctgggttatcccacaaatactgaaggattatcctcatgtaccaggatcttattcgtaacgaactgaatgaagccgctgaaacgctggctaactttctgcaggacgaagccaacattcacgcgattcagcgtgctgcggtgctgctggcggatagctttaaagctggcggcaaagtcctttcctgcggtaacggcggttcgcactgcgatgcgatgcattttgcggaagaactgaccgggcgctatcgtgaaaatcgccccggctatccggccattgcgatttccgacgtgagccatctctcttgcgtcagcaatgatttcggctatgaatatgttttctctcgctatgtagaatcagtgggtcgtgcaggcgacgtattactggggatctctacttccggtaactcaggtaatgttatcaaagcgattgaagccgcccgcgcccaggggatgaaagtgattactctgaccgggaaagatggcggtaaaatggcggggtcagcggatgtagaaattcgcgtaccgcattttggctacgccgaccgtattcaggaaatccatattaaagtgattcatatcctgattatgctgatcgaaaaagagatggttaaagcttaaaaggctattttgttagccattttgaacccgggcagtgctcaagatcctcacgtacatgaagtacgctccggtttctgcgcgctggccgtgtccaaactggctgcaccaattacgccttttatgtttcagtaagtggtatgaggtgaactatgtgcgaattgctcgggatgagcgcgaatgtgcccacagatatttgcttcagtttcaccgggctggtgcagcgcggtggcggaaccgggccacataaagacggctggggcattacgttttatgaaggtaagggctgtcgcacatttaaagatccgcagcctagcttccagtcgcccatagcaaagctggtgcaggaatatcctatcaagtcctgctcggtcatcgcccatattcgccaggccaaccggggtatcgttgcgctggaaaacactcacccctttacccgggagctatgggggcgcaactggacctacgcccataacggtcaactggaggggtatgagagcctcgagacgggaagtctgcatcctatcggggagaccgacagcgaaaaggccttctgctggctgctgcatagcatcaccgagcgctatccggaaatgccgggcgatatggttgaggtattcagatttatcgccacgcttgccggagcgctgcgtgaaaaaggcgtgtttaacatgctgctctccgacgggcgctacgtgatggcgttttgctcgacgaatttatactggattacgcgaagggcgccgtttggcgtagcgacgctgctggatcaggatgtagaaattgactttcaacgcgagaccacaccgaatgatgtggtctccgttatcgccactcagccgcttaccggcaacgaaacctggaataaaattatgccaggcgagtgggcgttattttgcctcggggaccgagtagtttgacgcgagctgcggctgcacaacttcgtggctgagcggtttgctcaccacgtagcggccattggctaccgaaaccaccggcggcttatgcgtctgccggaagtagtcgtacccgggtttcagctgctgccagaaatccgcgaagtaggaaaatttgtgacgggccatgttggcgtcggtcatgcggaaaggataaatgctcacctgaacgttgggctggccgaagactaacgcgccggtgacgaactggaagatttcatcaatgccggtatcggtcatggcgtaacagccaacggatacgcaggcaccgtgaatcatcagatactttccttcatagccatgcgcgcgatcgtaggcgttcgggaaaccgatattgatcgctttgtagaaacggctgtcgggttttagctgattgcgggaaacgttatagaaaccttcggggctcttgaaatcgccctggcgctgctttggaccgagcccgccggagtagttacagattcggtagctgtcgagaagctggtaggtttcgcccatcttgacgtaaagatcgagcatgcgctcttctttgaagatctcaatgtagaccggcgaacccatgagctgctgcttatactctttgctcatcggcgttgtcgagctgttactgctaagtagccctgcgaatgaaacgcacggcaacagaagcatcgcaataaataatgcgattttgcgcatactacttgttccttgataaaacaaataaccacattgccaggacggcaagagagacccgaaatcagagttttctggttttagagcgctcacattagcatcacggcattttttcgcaagcacgacgtgccacgtttacgttttagttttccgttatagcgaatattcaggtaaagcgcagtcagaactttgcgtaatagctcgcattttagaacgacttaatggcagtttgtctacaggcgctgctcacgaaatgttacacttgctccgctaaatactcagggtaagaaaggatgcttctctcccgtcttgtgaatcaccaggactacgatgttcctttcttcctcttattttccattaattatgctggcctcggcctgatgccggggtttacgtaacggatacctgctaacgatatgattaaaatcacgaaagggctaaatttgcccatagctggcatgccatcacagcagatttcttcgaagactgcggtcaagcgcgttgcgctgttgggggaagagtacatcggtatgcgcccctcgatggcggtgcgtgaaggagaccgggtacaaaaaggtcagcttctgttcgaagataaaagaaatcctggcgtgcgatttactgcccctgcgagtggaaccatcagcgccattcatcgcggcgaaaggcgggttctgcaatcggtcgttattgacgtagatggcgatgatgccgttcattttccccgctatgaattagccgatcttgccgcgttgacgcgcgaggccgtgcagcagcagctggtggagtcggggatgtggacggcgtttcgcacccgccctttcagcaaaatacctgcgccgggcagcgttccagcggccatatttgtcaccgccatagatacgaatccactggcggcagaccctcagccaatcattctggcccagcgcgaggcttttgacgcgggcttaaccctgttgacgcggttgaccgacggtaaggtccacgtctgccaggccagcggtggcaagcttggcgggcatcccgtgggccaggtgaccttcaaccagtttgccgggccgcatccggccgggctggtcgggacccacatccattttctcgagccggttagcctgaaaaagcaggtctggcatcttaactatcaggacgttatcgccgttggcaaattgttccttgaaggggagttgtctagcgaacgcattgttgcgctcggcggcccgcaggtgaaagagcctcgtttattaaagacctgctctggcgccagccttgatgaactgctggcagatgaacttctggatgatgaaaaccgcgttatttctggttcagtcctcagcggaacgcatgctcaagggccccatgcttttcttggccgctttcatttacagataagcgtcgtaaaagaggggcgtgagaaagagctgttcggctgggtaatgcccgggaaagataaattttccatcacccgcaccacgctcggccattttatgaagcgtaagctatttaatttctcgacggataccaacggtggcgagcgggctatggtgccgattggcaactatgagcgagtgatgccgctggatattctgcccaccatgctgctgcgtgatttgctggcgggggataccgacagcgcgcaggcgctgggctgtctggaactggatgaagaagacctggcgctttgcacctacgtatgtcccggcaagtacgaatatggcccggcattgcgcagcgtgttaacccagatagagcaggaaggataagtgatgggcttaaagcaactgtttgacaaaattgagccgcactttacgcacggcggcaagctggaaaaatattatccgctgtttgaagcgacggcgacgctgttctacacccccgggcaggtcacgcgcggcgcggcgcacgtcagagacgccatcgatctcaagcggatgatgattctggtgtggttcgccgttttcccggcgatgttctggggaatgtataacgttggcctgcagaccattccggcactgcataaattatacggcgctgagcagctgcagcaggttatcgccgggaactggcactacagcatcgcgcagtggttgggggtgaacttcaccgctgacgccggttggctcagtatgatgaccctgggggccgtatttttcctgcctatctacatcaccgtgtttcttgtcggcgggttctgggaagtcttgtttgctatcgtgcgcaagcacgaaataaacgaaggcttcttcgtgacgtcaattctgttcgcgctgattgtgccgccatcgctgccgctatggcaggccgcgttcgggattaccttcggcgtcgtcatggccaaggagatttttggcggaaccgggcgtaactttctcaacccggcgctggcggggcgcgcgtttttattctttgcctggccggcgcaaatttccggcgacctggtgtggactgcggcggatggtttctccggcgcgacgccgttatcccagtgggcaagcggcggcggtgaatcgctggttaacgtctctaccggccagccggtaagctggatggacgccttcctcggcaatatcccggggtcgattggcgaagtctcgacgctgatgattctcatcggcggcgccatcatcatttttggtcgcgtggcctcgtggcgcattgtcgcaggggttttcatcggcatggtggccaccgcgacgctgtttaactttataggctctgataccaacccgatgtttgccatgccgtggtactggcatctggtgctcggtggttttgctttcggcatgatgtttatggcgacggacccggtgtccgcgtcgtttacggataaaggtaaatggagctatggcctgctgatcggcgtgatgtgcgtcctgattcgcgtggtcaacccggcctatccggaagggatgatgctggcgatcctcttcgccaacctcttcgcgccgctgtttgattacctggtggtgcgggccaatattaagcggaggaaatcgcgtggctgagaataaaagtaacgatagcatcggcaaaacgctgctggtggtgctggtgctttgtctggtctgctcaatcgtggtcgccggttctgccgtggggctaaaatcgcgccagcaggagcagcgcgctctcgataaacagcgcaatatcctggcggttgccggtctgatgaagcagggaatgagcgcagatgaagtggctgacatttttaaggcccatatctctccgcgtttagtcgatttagccagcggtgagctgctggataaagatccgggcaagtttaatcaggctcaggccctgaaagaccctcagcagagcctacagctggaggcgagtcaggatcctgccggtatcaaacgccgcagtaatattgccgaaatttacctggtgcgcgatgaaaagcagcagattcaggaagtggtactgccaatttacggtaacggcctgtggtcggtgatgtacgcttttgttgcgctggaaaccgatggccgcacggtcaaagggatcacctattacgatcacggtgaaacgccggggctgggcggggaaattgaaaatcccaactggcgccagcagttcgtcggtaaacaagtgcttgatgataaagggatgcctgcgctgagaatcgtcaaaggcggcgcgcgtcctggcgacctgcacgccgttgatggcctgtcgggcgcaacgctgacgtcaaacggcgtgcagcatagctttgatttctggatgggcaaactgggctttggcccattcctgcaaaaggtgcgtgaaggggagctgaataatggctgatttgggcgacatgaaagaaatgaagcgcgtgctggtggggccgcttatcgctaataaccctatcactctgcaggttctgggcgtctgctccgcgctggcggtgaccaccaagctggagaccgcttttgtaatgaccattgcggtgacgctggttacggcattctccagcatgtttatctccatgattcgccaccacattccgaatagcgtgcgcatcattgtacagatggcgattatcgcttcgttggttatcgtcgtcgatcaggtgctacgcgcgtttgcctatgagatctcgaaacagctttcggttttcgtcggtttgatcatcactaactgtatcgtgatggggcgcgccgaagcctatgccatgaagtcaccgccgttggcgagctttatggacggtattggcaacggtctgggatacggggcgatcctaatcatcgtcggtttcctgagagagctgatcggcagtggtaagctattcggtattaccgtgctggaaacggtgcagaacggcggctggtaccagccaaatggtctgtttcttctggcgcccagtgcgttcttcattatcggtttgttgatttgggcggtgcgcagctggaagcctgaacagcaggaaaaggagtaaccgattatggctcattatattagcctgtttgttcgcgccgtgtttgttgaaaatatggcgctggccttctttcttgggatgtgtactttcctcgcggtatcgaaaaaggtctcgaccgctttcggactcggcgtggcggtaacggtcgtacttgggctggcggtgccgatcaataatctggtgtataacctggtgctgcgcgacggtgcgctggttgaaggcgtcgacttaagctttctgaactttatcacctttattggcgtgattgccgcgctggtgcaaatcctggagatgatcctcgataagtacttcccgacgctctataacgcgctggggatcttcctgccgctgatcgccgtcaactgtgcgatctttggcggcgtctccttcatggtgcagcgtgactataacttcaccgaatccatcgtttacggctttggctccggcatcggctggctgctggcaattgtggcgatggcgggcattcgtgaaaaaatgaaatacgcaaacgtgcctgcgggtctgcgcgggttagggatcacctttattaccacgggtctgatggcgctgggctttatgtcattctccggtgtgcagctataagggcggaaagtatggaaataattcttggcgtagtgatgttcacgctgatcgtcctggtactatcggggctgatactggccgcgcgttcgaaattagtgaatgcgggcgacgtggtcattgaaatcaataacgaagcggataaacaaattcgtactccggccggcgacaagctgctgaatacgctctccagcaacggtatctttgtttcatccgcctgcggcggcggcggctcctgcggccagtgccgggtgacggtgaaagagggcggcggtgatattctgcctaccgaactgtctcatatcaccaagcgtgaggcgagagagggctgccgtctggcctgccaggtcgcggtgaagcagaacatgaaaattgagctgccggaggagatttttggcgttaagaagtgggagtgtgaagttatctcgaacgataacaaagccacttttatcaaggagctgaagctgcgcgtgccggacggtgacgcggttccgttccgggccggcgggtatattcagatcgaatgcccctcgcacaaggttgcctatgccgattttgacgttccggacgagtatcgcggcgactgggataaatttaaccttttccgctacgtctctgacgtgaaagagccaacgctacgcgcctactccatggctaactatccggaagagaagggtatcatcatgctcaacgtgcgtattgcaacgccgccgccgcaggtacctgatgcgcctccggggatcatgtcctcctatatctggtcgctgaagccgggcgataaagtgacgatttccgggccgtttggggaattttttgccaaagaaacggacgctgagatggtctttatcggcggcggagcggggatggcgccgatgcgctcgcatattttcgaccagcttaagcggctgcacagcaaacgtaaaatcagcttctggtacggtgcgcgctctctgcgagaaatgttctatgatgacgaattcgagcagctggcgcgggaaaacccgaattttaccttccacgtggcgctctccgatccgcagccggaagataactggaccggccataccggctttattcataacgttctgtatgaaaactatctgcgcgatcacccggcgccggaagattgtgaattctacatgtgcgggccgccggtgatgaacgccgcggtcattaaaatgcttaaagatctcggcgttgaggatgaaaacatcatgctggacgattttggaggctgatgatgctgacggtatttgtcgcgacctttgtgattttcgcgctggttatcctgggaatgtcgcttggttatctgatcaagcgcaaaagtattcagggcagctgcggcgggatctcatcgctgggtatggaaaaggtctgcgactgtcccgagccctgcgatgcgcgcaaaaaacgcctggctcgcgaagcgcagcgcaagcaggatcgcatcctataaacagcaggccgcaccgtgcggccttttttgatttaccaggctttcgctttcgccggcgagtctaccattacgccgtcggcgccaagctcgcttgcggtacgaaaatcatcggcactattaatgccgaagaagacaatatgggctttgccctgtgagcggaaacaatccatagcttctttatcccaggtgagcgtggctggcgatacgccttcgcccagcgtgaacttctccactacttctaccttgcgtttcagctccagaccgtaccagtattcattgcccgacgccgcggttggctggcactggtggctaagtgaaatattagccagcttcgttcgcgtttcgccccggctgacgaaatgggggattgatgctggcagcgccgcgatatagcggtcttccgttgaatacacccgtacgcgcgagaggctattggttttttgcagtacttcgctaagacgcgccgccatgatggccggatctgcatcaggcgatttgatatcgatgtaaaagaaggtctgcggccactgttccagtaccgattgcagcgttggaatggttgcgtttttaccgcgccaggggtgagtttcaccgccccatgtccatcccgcgtccatacgggtcagctcggcagcgctgaagcttgagattttccccgtatggtcagtcagcgcggacagatcgctcgggcgatataagaccggaacgccatcctggcttaattgtaccgttatccaaatcgcctcggccttattctccagcgcaagttttatcgccggaagggtattttccggcgcatcgccggtgcctccccgatgcgcaatgagctgcggcgcggcgcaggcgctgctggcaataagcaaaccaagcgcagtaagtattgatttcatgattgcattcaccttatatgctcatataactatatgaaaagtaacttatatttattgcaattttatgttgtagcacgtttttcaggatagtggatttaaaaagattaaatttcgccgtattttgctatactgtatgcatgtacagtctaaggtttggctatgcgtaaaatcatccacgttgatatggactgcttcttcgcggcggtggaaatgcgtgacaacccggcactgcgcgacatccctattgccattggcggcagtcgggtgcagcgcggtgttatcagtacggctaactatccggcgcgtaaattcggcgtgcgcagcgccatgccaaccgccaccgcgctcaaactttgcccccacctgacgctgcttcccggccgctttgacgcctataaagaggcgtcgaaccatatccgggaaattttttcccgctatacctcgttaatcgaaccattatcgctggatgaagcctatctcgacgttagcgacagcgttcattgtcaggggtcggcgacgctgatggcgcaggagatccgcgagaccatccatcgtgagctaaatttgaccgcttcggcaggaattgcgccggtaaaatttctcgcaaaaatcgcctcggatctgaataaacccaacggtcagtttgttattgcgccgcatcaggtcgcggagtttgtcaaaacgttgccgctatcgaagatcccgggggtaggcaaggtttccgccgcaaagctcgagagcatggggctgaggacctgtgaagatgtgcagaacagcgatctggcgatgctgctcaagcgctttggtaaatttgggcggatactgtgggaacgcagccaggggattgatgaacgagaaatcagcagcgagcgccagcgcaaatcggtgggcgttgaacgaaccctgatagaagatatccacgaatgggtggagtgtgaatcgattattgagaacctctacccggagctggaacggcgactggcgaaggttaaaccggatttgctgattgcccgtcagggggtcaagctgaagtttaatgattttcagctcaccacccaggaacatgtctggccccggctgaataaagatgatttgatttctaccgcgcataaagcctggcacgagcggcgcggaggtcggggagtcaggctggtggggctgcacgtgacgctgcttgatccgcagctggagcggcaactcgttttgggattgtaacaatgttaacgataagaatgtacgaagagcgggattttccggcgctatgcgcactatttttacgcgccgttaaagagaccgccagcgctgactattccccccggcaaattgccgcctgggcgcaggttgatgaagcccgctggcggcaaaaacttgcggcgtcacgcgtactggtggcaataaatgatgcctcgccggtcgggtttattaccgccgtggatgactatatcgatttactatttgtctctcccgactatagccgccagggcgtcgccagcgcgctgctcaatacgctattgaggcagcttcctgagcgcgcttatagggtagaggccagtattacggcaaagcccttttttgcgcgtcacggcttcacggttattcagccacaggaagtgacggcgcggggtgaacgatttcttaattatttgatgcggcggcaaatcgaccccacatacagcgcgtgacaggtatgcccggatgcggttaccacaatcggcacggcgtgctttcgctcggtcattttataaagaaaaggcccactctctgcggagtgggcctgtgttgtcttacttcgccggaatggatttcagcagttcagtcaacagcgtccagtactggcccacgctttcgatatgaacctgctcatccggggagtgaggaccggtgatggttggcccgatagaaaccatgtccatatccggatacggttttttgaacagaccgcactccaggcccgcgtggataatctggatgttcggcgtcttgttgaaaagacgctgataggtttcacgcaccagatgcatcaccggcgagttggcgtccggctgccagcccgggtaggcgcctttcgcttcggtttttgcaccggccagcttgcccagcgaatccagcatgctcacgacataatttttgccgctgtcgatcagcgagcgaatcaggcagtgaatctgcacgttgtcgccggtcatggtcaccacaccgacgttcagcgaggtttccaccacgccttttgccacatcagagttgcggatgacgccgtttggcgtggcgttcagcagacgcacaaaggtatcacgagattgggccgtcagcgcaggctgctcgttagcaaccgactccagcagcacagtcaggtttttctctttggccgccagctcgtttttcaggatcgcctggtattcattagccagcgctttcagcgcgtccgctttatccgcggccacggcgaccgtcgcgaacgcttcacgcgggatcgcgttgcgcagggtgccgccgttgaaatcgaccaggcgcagatccagctcttcagcatggcctgcgaggaagcgtgccagcagcttgttggcattacctaaaccaacgtggatctcgccgccggagtggccgcctttgagtcctttaagggtcagcttaaagctctggaaaccggccggaacggcttcacgggtcagcgccaggtcagaggtgaagtcgataccccccgcgcagcccatgtaaatctcaccttcttcttcggagtcggtgttgatcaggatatccgcctgcagccagttggcctgcaggccaaacgcgccgtccataccggcttcttccgtcatggtcagcagcacttccagcgggccgtgaaccacgttgtcgtcagccagtaccgccagcgcggaagccatgccgataccgttgtcggcgcccagggtggtgccgcgcgctttgacccactcgccgtcgatgtacggctgaatcgggtccttagcgaagtcatgaacggtatcgttatttttctgcggcaccatatcgaggtgcgcctgcagcacaaccggtttgcggttttccataccggcagtcgcgcctttacgaatcagaatgttgccaacctggtcgcgttccgcgtgtaagcctttttcttttgcccagcccatgatgtgctcagcgagctgttcttcgtgataggaggggtgaggaatagagcagattttggcaaaaatatcccacagcggctgcggggataattgagacagttcagacacgataagtctccttacaatcacctgcaaaagtcgtttgcagatcgaggggttagcaatcaaatacactacaagcccgggcttgcgcgatggggttgagaataccactttccgtgtactctggtagtgtaaaccacgtaaaaagagtcgtcgtggccgcttaacgctggtttttagcgcgtcagatctctataatctcgcgcaaccattttccccctcgaacattatttaagccgtattacacaggctgggacacttcacatgagcgaaaaatacgtcgtcacctgggacatgttgcagattcacgcccgcaagctggccacacgcctgctgccggttgaacagtggaaaggcattattgccgttagccgcggcggtctggtaccgggagcactactggcgcgtgaactgggtattcgtcatgttgataccgtttgcatctcaagctatgaccacgataatcagcgtgaactgaccgtgctgaaacgtgctgaaggcgatggcgaaggctttatcgtgatcgatgacctcgtcgacaccggcggtaccgccgtagccatccgcgaaatgtatccgaaagcacattttgtcactatcttcgcaaaaccggccggtcgcccgctggttgatgattatgttgttgatattccccaggatacctggattgaacagccgtgggatatgggcgtggtgttcgtaccgcctatcgcaggtcgttaatttccagcataaatgctaattaccacgcccggttttgccgggcgtggttttttttacccttgcgcaggttacaatagcttcagtggcaacatgatggaggctgcacatgtcccaggctaaccttagcgaaacgctgtttaaaccccgattcaaacatccggaaacctccacgctggtgcgtcggtttaataccggagcgcagcaaccgatccagtctgcgctcagcggtaatcacgttgatcactggtatcgattgattaaccgcctgatgtggatctggcgtggcgtgacgccgcaggaaatcctcgacgtgcaggcgcgcatcgtcatgagcgatgccgagcgaaccgacccggagctttacgatacggtcgttggctatcgcggcggcaactggatctttgaatgggccaaacaggcgatggactggcagcagaaggccggtcaggaagcgaatctgctcgtgagtggtcgtcactggctccatgcggcaaacctttacagcattgccgcctatccgcacatcaagggcgacgagctggcggaacaggcgcaggtgctggcataccgggcttatgaagaagccgctcagcgcttgcccggcaagctgcgagagctggagttctctatccccggcgccgcgccgatcaccggtttcctgcatatgccgccaggcgatgggccgttcccgacggtactgatgtgcggcgggcttgacgcgctacagaccgactattacaacctgtatgaaaactattttgcgccgttgggtatcgctatgctgaccgtggatatgccttccatcggtttctcctcaaaatgcaagctgacccaggataccagtctgctgcaccagtatgtgctgcagcatctggctaatgtgccctgggtcgatcatacccgcgtggccgcctttggtttccgtttcggcgcgaatatcgccgtgcggctgggctatcttgagtcccagcgcctgaaggcggtggcctgcctggggccgatggtacacggcctgctggtggacccgctgcatcaggggcgggtgccggagatgtatcttgacgttctggcttcgcggctggggatgcatgacgcttccgacgacgcgctgcgcgttgagcttaaccgctattccctgaaggttcaggggctgctggggcgccgctgccccacgccgatgctctcaggcttctggaaagacgatccgttcagcccggaggaggagtcgcggctgattacttcatcatcatccgatggcaagctgctggagatcccgttcaatccggtctatcgcaatttcgatcacgcgctgcggcagatcgcccgctggattagccatagatttagttaatatattgctaaattctatcgatttggtaacgtcatggcatcactaaaggagatcgcaatgacgttaccgagtggacacctgaagagtaagctgattaagaaattcacggcgcttggcccttacatccgtgaggagcaatgtgaagacaaccgcttctttttcgattgcctggctgtttgcgtcaacgtaaaaccagcgcctgaaaaacgcgagttctggggatggtggatggagatggaagcgcaggaatcgcgtttcacctatagctatcagtttggattgttcgacaaagagggcgtctggcgtccggtcgcgattgacgatcctgaagtcactgaaaagcttgaaaagacgctacgtggttttcacgaacgagccgaagcgttgctggcgacgttcagtcttaagctggagcccgccgatgattttagcgaaccggttaagctgagagcctgagttccggtcagcggctgtcatcctgctcgcaataaaacccgcgtttcgaccagcgcgggtttccttcccaggcaaacccgcgctaaataccgtttaatacccgacagggttgaccgacggcaatcattcctgcggccagatctttggtcaccaccgtgcctgccccaaccttgacgttgtcgcccagcgtgaccgcgccaatcaccacggcgtgggcgccaaattcgacgttatcgccgatgcgcgggctgtcgccctcacggccctgactgtcggtcacgctgccaatcgtgacgccctggcgcagggtgcagttctggccgatgaccgttccccgattaatcacgatgcagtgcggatgatacagcttcagcccatagccaatgcgcgctcgccacggcagctcaatgcaaaataaacactcgttaatcacgatattgagaataacgaaggggataccgcagatcttccacagaggattacggctgcgatagagcgtcgccagacgataaagcagaaccgcgattttcgcttttatgccgccgcaggatttgatttcccgggcgaccagcctgatagcctcaaacatggttattccttaaggttaaacgaagccagtgaataccatccatcaccggttttaccttcgttagcgagttgaatacgcggctggccctgataattggtcagggccgcttccagacgatattggccgcccgggagtccggcaggcagcggcagcgtagcgctgctgtgatgatcgccgggcagccactggcgaacgtcatccgccgttttgatttgcgtaacggtcgttccggcgtcattgactatccgccattgcacaaggtacgggagataggctggcgcgacgccgtcgttacgccaggtgacgtttagcgtaagcggcatgccgctgcgtacgggcgtatcccattccagctgacccacccggtagcggtagccgattcgcaataacgcgctatcaacgatatcgcgatacgctgccggcaccggacgcgatttcagattcaaggtactggcgtgctgcgctaatgcccagtcgaagcttgcctggacctcttcgcgggtatagtgctgcacgctttcccactccgccatataaccgcaaatttccaggctaacgggggcgtgctgccagctatcattaaacccggaccacgccgtctgcgccgcggccaggcgttgaggataatcatcgcgcatatggctccactctgcggaaaagttatgccagtctccccagcaatccgcgcgccaccccgcgcctttttggctggcccaggccagcgaattaccgccgctgattagcatgattttgggcgttttcgggaagctgctgaagtgcatatcaacgtagcgattgagctgctccggagcgtacttttccagcaacggcgcaacgtcagggaaattggagttgtgccattccccccacgaacccaccatgccgatatcgacaaacgcgaggttcggattgccgtcataacgcgcgccgagggcgttaagcagcttttgcgcataggcgataaaagtcggatcgctgaggtccggcacaaaggttttgccattttcgacccattgtccctgaatgccttttttgataagccaggcggggattttcgagcccgattgcggttcatcgagcgccatgaaacgcaatccgacgttcatcgccggctgatgccgggcggcgacgctgaaagcacgatcgatcggcgcaaaatcatagacgccttcttcaggctccagatcgctccagtaaaagcgatcgtattcaaacccggtgtccggatactctttcagagaaggcttctggccataaccatcgtggaaactggccacgccgatccctgggttcgttaacagaccggtaaaggccggcggggtgataaccgtgcgttcagccagcactgccgctgagggtatgactccggccagcagtagcgccacaagcagcgcggcgcggcgcagcgaaaaagagctcatcgttaattcactttatcgtggaggttcacaaaccacgtccagataccgacgtggaagtttttaaacacatcgatacccagcgcggatttcagcatatagagcgccagcagcaccgcaagaatggcgaacagcacggcgatggtaatcgccagggtggagaatatacgcccgagcagcgtactctctcgcggaattttgcgcagatcgcggccgcataaaaagaccacgaaatagcggcgatgcagaaaaggaaaactgtggcgaaaatcgatgcgatggcgcgaggccaggctcgatctcaccagcgcctgttcaataccgcgcttttgctccggcgtgagtgaggtttctgtttccgggtcaagcgcggaataaaagcgctcgacgaccaggtcggatgttgatttagtcacggttgactcttattcgttaaacgctgatagacctgagcggtttttgccgcaatgtccggccagcggtatttgggcatcagttggctgtaatccgcggtctcctcgccgcgccaggactggagcttttgcgccagcgcggcgacattgcccgtcggaaaatagacctcggcaggcaggccaatctcgaggttggccgggatatcgctgacgataaccggcagtgaccaggacatggcctccagcagggcaatgggcagcccttcgtgataagacggtagaacaaaaagcccggcctgtgagaacaaagtgtgcagcggatcgccgctaataaaaccggtcatgatcgctcccggggtttcggccgcctgcttcttcagccgctcgctgtactcatcgggatggtcggcatcgccaatcagcaccagcggcagcgaacagttcgaggctttgtaggcggcaagcagatcgtgcagccctttttcttccacaaaacgggcgacggcgacaacgtattgcccggcttccagcgaatactgattcagcgtggcccgtcgcgtctcttcggcgggaagctgcggttggcgcacgccgttatagatcacgttagcgttggtacggccgtgtttggtcttaatcagcgtattaatcacttccgagataacaataacctcgttggcatatttcaccgcccatttctcaccgaggcgcagcatctctttcgccattttgccccacttctggcgatcgtagtccgggccgtggtgggtaaaaacgacgcgtttgccgagcaggcgcagcagcgggaccaccaggcctgggccgaccgcgtgaacgtgaaccacatttgagccgtcaaacagggtgctgaaggcggccagcgtagagtgaataatggcttcgaatttacggcttttgggcgcccacaggcttttcaaccgcacgcctttatattcgctacggcgatagtccacgtacggtgagcgggcaatgacgcagatatcggcgtgattctggtgatagatttccggatagagattctggcagtgggtctcaacgccgccctggacgttcggaataccgcgggtgccaagcaccgtcactttgagcttcatttcgcttcccccacgagctgctgatagagttcctgcagaacctgcatatgccgggcgagatcgtatttctcctctaaacgctggcgtgcgttgatgcccatttcacgcgcctgctgcggattgacggccaggctatccatgatgcgcgccagcgcgtcggcatccccgggttccaccagatagccatcaatgccatcgcgaatttgctccggaatgccgccgatattgccgccgacgacggggcgaccgaacgccatggcctccagcaccgacatcgagcagttttcataatattcggaagggacgatcactgcccgcgcgccgcgaatcaacgcgttgagcgcgtctccgtggcgcatatagccgagaaattccggaccgctaaagcgagcgcgcaggtcgctgccgagagggccatcgccgacgattttcagcggcatggactgctgcattttttgctgcgccagcgccagggtggcgacgcctttctcacggctcaagcggccgatatagaggaaataatctcccgccgtatcgcccgggatcgtggtgctggcatcaataccgttgacgatcacatcgatccgcgacctgggtaatttacgccgcagcgtctgacgcataaattcgctgggagcgataatgcaatcgagcatggcgtaattttgcgcgaacttttgccagtaggcctcaagcgagagcagcaggcttttaaaggtatcgccctgctggcaacgatggcgaaaggcattgctcaccgaaccggtaagacagtcatcgcagacgtggccatcgcgtagcatggtgtacgatgggcagacgattttataatcgtgcgccgtcagtacggttttgcagccaaagcgcttagcgacgccaatcaatgcgggcgtcagctggtggtagatattatgaaagtgcacaatatccggacgctgctccagcagcagggtgttgagcttattgcaggcctcagcgttgtagataaagtcgatgcccgctttgagcttgcccgtcagcccgtggctttgatgataatccacgttatgtacgaagaagctttcccagggcgaaggcttattttccgcatgctgcatgctgaagtcgacaacctgatagcccgcttgcagcatggcgtctcgctcctggaaaaaaacggtttccgctccgcccttaataaaaaagaatttattaacgaataatattttcatgttctgtctggatatgttttgggttggagacggtcacggcgggttgtttcagcggatcgcgaacggcgttaatcaggcctcgcaccatacctgcggaaaataacgataagttgatcacgctctggacaccgtcccgcagcgacttatttttaatcgccttcagcgcgataaacgccagcagcggaagcagggcgataataatcaccccgggattgagcgacaggaggcaaataatcaataccaggatatacagcgtgaatatcagttcgttgcgaacaatcttaagcgcggcggggaaatgcttttttccccagcagttgcgtaatagctcacccggcgcccataaaaaaccgttcttccagcgataggtcagcattttaaatgtcggcatggtataggacgcatggctaaaatagggcgcggcgaggcggtggagtttatagcccgcggcctgcaagcggatccccaattcggcttcttcataaccgtgaaggttaagattggtcagatagccaattttctcgattgccgaacggcggtaaaggccgccgccgccaagatgatcggtatcgccctgcggatagataagatgcagacgctgcttgcgcgatttaaactcatagttagcggcgtcatccatctcgacgctgcccgccacgcccgcatattcgggatgcgtttcaagaaacgccacggcggtgtcgagaaaacccggctccagctccatatcgccgtccagcagcagcagatagtccccttcgctgaataaccagcccagctggtggcccacgccgcagcagcgatctttcgcgttatcgaggcagaccaccatcgcgtctttggcgacggccagctcccgggtattatcggtggacaggctatcggcgacgataatctgatgcgggtaaggctgcaattgtttgcggacgctgtcgatcgttttttcaataccctgcgcttcgttgagggtcttaatgctgacggtaattgatggcgttttattcatattgggtaccggagttcagacggacggaacgatgaatgacaataagcgccccgagggccagccataataaaaactgtagcatgggaatgatcatcaggatctggctgtagggaaggctgagcaaacagccaatggcaaagacgtaaaacgcaggcgcggagctgagcagctgtaaatcttcccgtttgagatcgcagcgggaaaaggtctctttgggccgcatgccgatgagaatagcggcaatcatggcgataaataagatcacgccgataataccgacttcccacagcatcatgctcagcgcggtggagtcgagtatcagatgataccaggcgccgatatagccgggggagacggtactgccgctgttggtagcgttcagaccgtagccaaacagcatcccgccggggccaaaaagctcgttatgctggagccagaagaaaatagtggtaaaccgaccgagctcgccgctttccataatgtaattggtatcaaagatatagccgagggaatcgataaataccgagagcgcgcttttggtcgggtccccgccgaaggccgacgagtaattggacgccagaatggtgatagcggcaaaaattagcaccaccattccggcggcgataatcatcaacgagcgcagggtgactttgctgatgccgctgacgtaagcgggcatgatccacagcagcgccagtaagaaaggcgacagcagaatcacgaattttacctcgcccaccacgcagaggaaaaaggccagcacgatatgcgccgccatcgacttgaacgagcagataccgtgcttaaattcggacaccttcagcagcataatcagcaggcagaacatccccatggccgcggtattgccgccgcccatcgggtcgccgccaaacgtgccgaccaccgaatcccacttttcatcctcgccgcgcaaagccacgcgttttggcaccaccaccagcacctgatagatagccagcgggaactggacgtagaacagccagtaaaatagccgggtcaggcggtgcagctgcgactcgcgaaacatgccgagcagcatgcaaaacatcaccagcgacagggccagttcgtttttgaagccgacgatggcggtaacgatgccggattgtaaaaccgtggcgcagaggctaaggatgataaacgtcagatacagcgccagcaccaccttctcgcgcgcgctaagcgccagcggctgcggccggctttgcatcatcagcaggaccaccatcaccagcaccatgaaaaaggggagccacagcacggctgccacgccggtgaaatactgaatcgtgccgcagaagacgatggtcgtcagcgcgaatacctccagatagcgaccggtgtttagctgcatattttctgctcctgccgggagagctgtagcgcccgtttgttcattttcagcaggatgaacagatagcgaatgctggtcagcacggagaacgtcaggagggctatctcatagcgctggcccaattcaggcagcgcgataaaagcgacgataataatcagcagctgctcgatctgaatgcgtaaaaaatagcgtttagaaccaaagataagctcaataacggtcagcggactgacggccagcgcggcgaacagataaggcagcatatagcgtgaggtcggaatggaattgagccactcctgactgaagcccaggcgcatgaccagcggatagaaaatccagatcccaaggatacagatcagcgccgcggccatcagcagcaggcgaatctttttgtactccggatagttaaaggtgccgttgcgaaaatccatcgaccattttgaaaagatggagttgcgcaccgcgttaccgacaatcatcaccggtgataaacagaagcggctcaccaccgagaaatagcccgcgaccagcggtgaaaaccagatatttatcaacatcgtcggcagattattgctggccatcgccagcacttccgcgctgccgacgcggctgaggtgctgccagtgctggcgcgcaaaaaggccgttcgctcgcggtgaaaagtgcgccggcgtcagggtgctgaagcgaaacaaacgcagcaggcagaggccgagcagcagcaaaatgcccgccatccaggcaatatagaacagcgtggtattcggcatcgccagcagagctatcgccaccaccagcgacacggcgatacgctggaaggtgaggaactgatagttaccgccgcgcagcgagaggttctcggcgatcaaaaccagcgcatagccgaaggtgagcaggtagagaaacgcgatattgagatggaatatcagtccggtgatgaccgcccacggcagcgccagaagcaggctttgcagcaggcaaaacaccacgttctgccccagctcatgctcttcctggcgcgggatcagcagctgcgacgcaaaggtgcaaacctgtgcgccaatcagcacgttgctgtagatcatcgcatagtgcccgacttccgccatgccgtagcgatgggaaatcagccatacggaaaaagcgccgatcgcctgcgagaggaccgaggagctggcgattgaagaaatactcttaattaagttcataatcgctacttcggtgaaatcagttcgcccatgccgcgctcgggcaggcgtttgccctcctgcgtctccaggttctcttcttgcacccggttaagcatggtggcgacaggcgttggcgcagcggcttgcagacgatgttgcgcgtcgcggatgcgcgacgcctgctcgcctgcgttgaccaccagcaggctgatatcgacgtgcggcgccagcagcagggcgtcctgggctagcccgagcgatggcgcatcaataatcagataatcgtaggtctgccgcagcgtcgtcagcagcgccgggagccgttcagaagtgagcagcagcagggctgagtcgctgagttcgcctcgcggcataaaatccagcgtctcggaaaggggggccatcgcctgggacgcggcgctgcggccatcaagacgctcgctgaaccctgttttatgctgaggatagcgcgcggagagccccgcgcttgccagataatctatatcgatgagcaaggttttgcctgacttagcggcggaccacgccagcatttcggcaatcaggctgctgcctgcatcggcctgcgccgaggttaccagtatcgtcccgctatgagtattctggccgagcagcgccaggcgcaggctgtggagcatatcggcatacagcaggttctggaacgtcagcttcgcgctgttcgcctgaggcaacagcggaaactcaccgctggcatcaaggcccgttttggctttcagttcgctgatgctgttcaccgttttgtcgagcgcggtgctgactatcaggtacatgatgtacagcgccagcgccatcagggtcgccatcacgataagcagaccgcgctgcggtttagaaggaagatttggcggcacggcggcatcgtagatcacttcatcgggaaccgaaaagctctcggagagcttctgctcattcgcccgctgatacagcgatttatacagctcttcggttttgttcagcgcggtcatcatggtgttgtatttgtcgcgcctggcgcccagcgcctggaagtcggctttctgatcgtcgagcatcttctgatagtgctgctcatcgtccagcgcaatctgatactgctgacgtaagccgttaagtagttcccccaacacctggcctatctgcccgttgacgacctgcagctgggcctgagcctgaagatatttcggatgcttagggccatagtgttttgccgcttccgataagttacgccgcgtctggatcagcgcgatacgcagatcctgaatctgcggatgaccggaaatttccggcagcgagatgatggcttccggcgcttttccctgctgacggcgcactttgtcccacaccgtttgcgctttcagacggcgctgggtggcgtcggccagatggttaatcacgatccccaggcgctcggtctcgtagccatccatgctgcgaaaggtcagcaggccattttgtttgagaaaatcatcgatgtcggctttctggcgatcgagcttatcgcgcagatcgtccatcattttctcgttccagccctgggcctgaagtaagattttctgcttctgcgccaggctgtaatcgataaacgcctgcgccacgccgttggcgatatcggcggctttttgcggcgatttcgcctccatcgaaacggataccagctgcgtggtgcgcacgccggagatggtcaggtttttttgcagggcgcgcagcgcattattgacccgtgcggcctcatcaagattgtccccgccgttaaattccgggtcccgatccagctttagcgcttttaccgcggcttccagcacgacgcgggagcccatcagcgcgtatttggtttcatagtaatcgctgcgggtggaatcatagttttccagccgcggcaggggggtaacatcctgcgactgcgctttaaacagcaccgtcgcggttgcggtatagctggatgacataaagcgcgtcaggatccacgacgccgcggcagccaccaccaccaccaccaggcaccagatcagcttgtgcttaattttgttgaaataaggcgtgaagtcgataaagccttctttcttctttccattttcaactaatgaaatagccatatcagaagaaactcatgccaatgatgatggtatctccggcctgtacggcggagtcggcggcgacgttttccagcagtttaccgctgcgaaactgacgaatgcggatgtcatggcgatcggcgcgatcggtaaagccgccggccagcgcaatggctttttcagcggttaagcccggttcccaggcgtaaccgtccggttttttgacttcgcctaacagataaattttacggtattcggcaatgctcacggtcaccattggcgcctgcagatagttaccgcgcagcttatcggcaatttcgttgccgacctgttcaggcgttttccctttcagcatcagggagcctatataaggataatcaacgctgccgctattatcgatttttacgcgcatagtgagatcctgctcgccggaaaccgcgatattgatctcatctccctggtccagatgataaacggcatccggcggcgttcggatcgtctgcggcggcgccgaacagcccgccagccatagcgccagaagagaaatcaccgcccgttttccatagctaaggatcatatttgtacctgtgtcataaaaataatggccgagtcgttgtagcccagcgtgcgctcgacctcatggtcatagtccgggccaatataaaaggcatctttttctttattagaatgcatcgtgttccattgcagcttcagctgaaaattaacggatggacggtagtcgtagttgaaggtgagcgacacgaggtttgatcgatctttgcgtccgttggtctggtgtttgtaatcctctgtaatataagagtaatcaaccagagtggagaacctgtcgaccagccagtggtgctcatagcccagaccgaaatttgataccagaatatagccgccggagtcggtgggatcttttattcgttgtgaactatgtaagttgagctttatctgttcaagtggtttccaatcggcgttaatatcccagttcaggccgttgaatccctgcgagtcgggattatggataaaatctttatacagccaggcgacgttgccgtggatctcggtcttgccggaaagacgatttttcatgccgaccagcagataatattcattactgtcttttaacgggttgagctcatagcgacgctggttggtaataaaactgtagcgatagcgcagcgttttggctttttgatcaaaaagctcggcgaccaggctgttttcatgccactcctgatcgtgcatgtaataatgaaagtcggcgctggcgtcctcaatgctgtcgagattgcgaaagcgcagctgcttatgcattagcgcaacttctgctttaccgcgcccttccggcgccccgtagctatagcgcagttcactgttaaagaagcgcgtggcgatgggcttattaatgccaaactctttaaactgctcggggagaaacccctcggtggtatcgcggccgcgctcttcatggccgaacgtttcatcgagatccaacgacagtccgtgcatgcttccgaagcgccacttgccgttaaacataaaaaaatgattgtcgcggttatctgcgctatcgctggcgtagcggcggtaatcgccggagtacatcaataaataacggtcctcgtagcgttcgccgatggctttgaaaatcggcttaacgccttgataagcggagccgatttcattcccgccgtagcgttgccaggtcacgttgtcattgtaaccgacgtcataacccacctggctctcgaaatcgatgccagccacaccggtatgtggttttgcctgcaggtcagcccatgcgtaaggcatcgccagcaaacctgcgaggaaagtgagttcagaacgcattcttccccacaaatccgcggaaaaacgttaaaaacacaattttaatgtccagcagcagcgaccacgactgaatatattccagatcgtactgaatgcgtttttccattttatcaatcgtgtcggtttcgccgcgaaaaccgtgtatttgcgccagcccggtaatgccgggcttcactttatggcggatcatgtaattttccaccagcacgcgatactgctcattatgcgcgaccgcgtgagggcgtgggcccactatcgacatggttccctgtagcacgttaaaaaattgcggcagttcgtcaagagaggttttacgtaaaaaggcgccgaagcgggtaatgcgcggatcgttacgcgttgcctgggtcactaccgcgctgttttccatcacgcgcatggttctgaacttccagacggggatctgtttaccgttcaggccgtaacggttttgtttaaacagcaccgggcccggcgaagtcagcttaatgccgatcgccaccgccagcatgaccggcaggctgaccagggtaaaaaaagcgccaagcacgatatcttctatacgcttgagtaccgcgccttcgccttcaaacggcgaggtaaaaatgctgatcgtctgaatattgccgaacatccgcagttgagaaatatgtgagctgtaggaaaacaggtccggtaccagaaacacatctacggtggtgtcggaaaattcattcaagaactggcgaatacgctgctgggcgaccatcggcagggcaatatagacttcatcgatttctccggctttcgccagcgccagcaggtctcgtgagttgccttttttctcaatgctgagcaggcgactgtcgcgctgcacggcgcggtcctcaaagaaggtgatgtcaatcccgtcgtgggtatactccttaaacagcgcctgctcgatggccagcccggctggcgttatgcctaaaatagccaccttgagtctggatttgaaaaaatagcggctggagataacgcgaatcagaaacatactaataaatatggcaatcgagcacagcacaataatttcagctaatcgcaccgcgtttgtgctggcgtgattgttcagtaataattcggcgcttacaaacaataaaaatgataacaagccgcttatactgacgctgaaaaacaatttagttaatttttttaaatactggcctttaaactgaccagaatatagctgaaagtgttcattggctctgataaaaatcagtgaatatattatgcccaggaacagagaggccgttgagggttcgacgaaaaagtattttaaataagcgaaaatgaacaagttgacggcaataaaatccagtagcttcatcagcttactatagcgggcgttgtatattttaatggtgctatccgtcatctttttgctcgttttatagtcaataaaatgatgtcctgtccttctttaaagctgaatttatgtctatgaatctattcaaaaattaagctttagctcggcgttgattattgtagcctacgattaatcttatgtcgaacctgccccggactgagaggagataacttttcctgacgtgcaataatatttttatcattgcctgaagcataaaaatggcggttacgattaaataggggcggagagacccgggtggcaaacgaatggccgtcagggctacagttcctggccgatccgcacttgagcgttaaaaaatccgcgccagcggggctggcgcgtttatcggctaaatcccaatgcacatgtatttgatttctaagtaatcctcgatgccatacttcgacccttcgcggccgagaccggaagatttcacgccgccgaacggggcgacctcggtggagatcaggccggtgttaatcccgataatgccgtactccagcgcttcgccgacgcgaaagacgcggctcagatcgcgagcgtagaaataggccgccaggccgaattcggtgtcgttggcctgagcaataacatccgcttcatctttaaagcggaatagcggggcgagggggccaaaggtctcttctttcgccactttggcatcaccggggacatccaccagaatcgttggctgaaagaaatttccgccgagctcatgaactttcccgccggttactattcgcgcgcctttgcccagcgcatcggcgatatgctcctgtactttggcgatcgctttctcgtcaatcagcggcccgatggtgacgttgggctgcaggccatcgccgatttgcagcttactcaccgcctgctgaagcttttcggcgaaacgatcgtagacgccatcctggacatacaggcggttggcgcagacgcaggtctgcccggcgttgcgaaatttggaggccagcgcgccttcgacggctttatccagatcggcgtcatcaaaaacgataaacggtgcgttgccgccgagctccagtgagaccttcttgatatctttcgcgcactgttccatcagctggcggccaatttccgtcgagccggtaaacgagagtttgcgcaccagcgggttaccggtgagctcattgccgacttcactggccgaaccggtgaccacgttaaacacgccctcggggatcccggcgcggttggcgagctccgccagcgccagggcggagaacggggtctggctggcgggcttgagcaccatcgtgcagcctgcagccagcgccggacccgctttacgggtgatcatcgccgagggaaaattccacggggtgatagcggcggttacgccaatcggttgtttaatcaccagcagccgcttgtcggcctgatggccgggaatggtatcgccgtagatgcgcttgccctcttcggcaaaccactcgataaaggaggcggcgtagctaatttcaccttttgcttctgccagcggtttaccctgttccagcgtcatcaggcgcgccaaatcgtcctgatgctccatcatcagctcaaaccagcggcgcaggatagcggagcgttctttggcggtaagggcgcgccatgcgggcagcgcgccggcggcggcatcgatagcctcgcgggtttctgcggcgcccattttgggcacgctgcccagctgctggccgttggcggggttcgtgaccgcaagggtctctttgctgctggcgtcgcgccagcgtccgttaatcaacgcctgctggcgaaaaagggtagggtcgttaagttgcatggttgcgtcctgtcgtaaactgttttagcagtgaatgcgtccggctcggctgggcctgccgtttatagaagctcccggcagacgcagcggcatcaaacacctgtccctgtttagtgtagacgaatgcgttcagagaaccgggagcaatgctgggtgatacaacaataaccacaaataatttacggatatttgaactggcagaacgttattgtgcaaacaatgctgtattttttatgctcaatccgcaagaaaggagcgctctatgtcacagcaagaacggttttgtcaggcctgtggaatgccgatgtccgccggggaggcgaaaagcgcaagcgacgagtactgcgcctggtgctgcgatagcgaggggaagcttaaatcctgggaggacgccgtctccggcctggccgagttcctcgattcctggcagaaggtcggccccgcggaagcgcgcaagcgggcgatgcgctacttaacggccatgcccgcgtgggcccataaagcggaagagtaacccgcagcccggagcgcaacactccgggcttttttagcgcgatcagaacttccaggagacgctgccgacgatactgcgctctgcgccaaagtagcagtaagagagcgagttacaggcggcaacgtagctcttgtcggtcaggttattcacgttcagctgggcgctgaggcctttaattcccaccttcgacaggtcatagccgatcgccatatccaccagcgtataggacggcagagtgtgcgtattcaggcggtcgctggtaatgccgttgacgtagcgcacgccggaacccagcgtcaggccatccagcgggccgcttttcacatcatagctcagccaggcgctggcctgattgcgcggcgcgtaaacggcacgcttgccttgctcttccgggctgcttttcttatagcgaatgtcggtgtaggtataggcggcctgcaggcggaagctatccgttagctggcttatcgcctccagctccacccctttcgactcaatttcaccaatcgaacgatacggatcggtcggctcttctttggtggcgatattggtctgattgatgcggaataccgaggcgctgaactggctgttcattccttccggctcatacttcagcccggcttcccactgcttgcctttcatcggatccagcacgttgccgttttcgtcggcgaagctggtgggcgtaaaggcggtggagtagctgatgtacggggcaaacccgttatcgaacagatacagcagcgcggcgcgggtgctgaagttgttcttatccagatcgctgcgcgtttgattaagcttatcgatgttggagacgctgacctggtcgtagcgcccgccgagggtcaaacgccagcgctcccaggacatttgatcctgtaaatagtagccggtctggcgcagcttgtgcttctcgcggctgtacatggtgatgtaatccggcttcgcgccgtagaccggattaaaagcgtcaatggccgggaatgcgccatagtagccggtggtgtcgttgctgcggtcctgatagtcgatccctatcagcaggcgatggttaacggcccaggtatcgacgctgccgtcgagctggttatcgagggtgatggcgttcatcttttcgtccgagccggaatagccgcggttcagctcggtttcgttcagccagcccgcggcataaacctgattcagctcgactttggtatgcaggtagcgcagcttctgccgcaccgaccagccgttatcaaacagatgctcgaagttgtagccgaccatattttcgcggcgatcgtacttgtcgtagtcatcttctccctcgaagaaggtgttagcgattttcttgccgtagtgcggcaccacggtaccttcataggggaggcccgagtggctgccgccctccgggtcgcgatgcagataggccattaaatcaaggcgcgtctggtcggtgatgcgccaggtcaggctgggcataatcgcgtagcgctgctcttttaaggtatcaaactgcgagtctgcatagcgggtcatgccgcttaagcgcgccgccacgcgatcgttatcgtccagcgccccggtaacgtcaaacgccgccccgcgctggttgttattcccggcaaacagcttaatttctccgccgggatcgaatgagggtttacgcgaggtgagggcgacgatgccgccgggcgaagagcggccgtacagcaccgaggccgggccgcgcaccacttcgatattttccaggaaccacggatcgaccaccagcgagctgtgcgagttggtatcgcccatcattttcaggccgtcgagatagacgttatccaggctgccgtcggagaagccgcgcaggacgatatagtcaaagcggttggaggcgccaatctggttgctgtaaaccccgggggtatagctcacggcctggcggacgctgatcgcgccctgttcttcaaactgctcgcgcgtgataatagacaccgattgcggggtctctatatccggggtggcaattttggtcgcgccgctctgcatctgcgaagtgaccacgatggtttcgttttttgttgtttcctgggccagcagcgggaaggcgacgccgccggtcacccatcctaccagtagcgccaggcgagttttcgcaaacatgaacatctccaaaggcatttctaattgttaataagaattattacctttttgatgctgtctatagctatgcgcaatgccaggatacgtatgcgcgctgccaaagccgctgactatttttcgcaaaaaggggaaaaatggattagcccggcttttgcacatcgcagggcgagatgccgtagcgccgacgaaaagcggtagagaagttggtggcgtgctggtagcccgacatccaggccgcctgctgcacgctatagccctccagcagatagcttcttgcccgcgccaggcggcaatcgcgcaggtagtcaaaaaccgaacagccgtaggcctggcgaaacttactgcgcaagctgctggagctcatcgccgcccgctgggccagctcattgagggtgtagtcgttttccggcgcctgctccagcaggcggcgaactctctccagccgctgctgttcgccgcccgccggggcgacgtgcttcgcgctttcatcctgacagacgctcagtccatggccgaacagctgcaggataagcccttccagcatcagctgtcgggacacgcgactcagcgcgctctgctgcgcgtactgcagtccgctcagcagaaaacccggtatctgccagataagcgttggcgtctggcacctttcccactcgcgcatcaatgaatcgagcaggccatcgcgccaggtgccgtccgggtagagtccgagggagagcgtacggagccggctgtcggcatcgtggcgggcgcgcatggcctgatgttcgctaaggcgcgaggtgaaggccatcccggaacgcaccaggtgctgctccccgttgagggtcagcgcgacgcagccttccagcaccaccagcatatagagcgggctactgtggcgggaggtggtctcataaggctgcaatacgtgaacatcagaatgggtgacgcacatgccgcagggcagggtcatctcttccacttctccccgcagcaccgggctggcgtgcggaggctccggcttttgcagcagctgcgggaagcggtagtcgataccgtatcgttcaccaaacgccataaactcgctgacggagaaggttttcctcagcgcctggcgggcgggttcgttctgcgtagttgtcttgttcatgcggttttcggcaccggagagggcgtcatcggatgacgtcaccttatcactgcgcgggcagggcgacaataaagatgagaatcattatcaacttttgcgctgcggcacagaaggcgcgcggacggccgctatccgtgcgccagcggcagggatcaggcgtcagcgttgtccagcggccaggagtcgaacaggtagccgtcgaagtagatatcatcgacgttggagaactccagcaggcggcgtttgacgttttccagatgctgccacatggcaagcttggccgcccgggcgtcttttttgattaaggcggcgaggatccgtttgtgatccaccagccactcctgacggtagtgggtatcgccgagatggcggtgcagctggatccacatggggttattttcccgccactgccatgactgcctgaacagctcgaccagcatactgttgtgggtcgcttcggcaatggccagatgaaactgcatatcgccgctttcggagccgcccggcgcgctgctggccagctcgcgctcttccagctgcaaagcctggcgcattttgatgatatcttcccgggttgcctgcagtgcggcaaattcggcgatattgctctccagcagctggcgggcctgcagcagttcaaacggaccggcatcattgcaatgattgatgtccgcgctctccgccgcgccttctccgacggcgttatcgagcacgtagatcccggcgccgcggcgcacttcgaccagccctttaatctccagcatgatcagcgcctcgcggaccacggtgcgggtcacgtccagcatctcggcgatttcgcgttccggcggtaagcgatcgccggggttatagggcgtctggacgatcagattgcggatcaacgcgccgacttcctgatagggtctgtgctgagaagtttgtgatttcatgatgttatgttgtgagatgcgatagcccggtggctgactatagcatctggccagggggttggcacctccccttgcgcggagagtgggaaaacgggtcaaccacattggtgttcagttgacccgtggcaggacagagcgttacaggccgccgccgagcgccgcaacgcactcgcgggcgccgcgttcgcacagcgcgtggtaagcctgcgtcaccgccgcaataaaatcgctattgtccggcagatcgtgggcaaaaattccgcttaacgccagcagcgcggcgacgcgttctgcaccctgaaaacgctggttgatctgttggatctccgccagcagcgggtcgacgacatcaataggctgcccccgctcgtcgatgccctgggtatagcgcatccagcccgccacgccgagcgccagatggcgccagctgctgccgttttgcagatgcaaacggatgggatccagcaggcgctgcggcagcttctggctaccgtccatggcgatctgccaggtacgatggcgcagcgacgggttgctgaaacgggcaatcagcagcgtggcgtaggcctggagatcggtgccttccggcatggagagcgtcggcgcctgctcctgcatcatcagggcgaaagccgcttcacgataggccgggttggtcatggtatcggcgatggtttcatagccgccgagatagccaagatacgccaggaaggagtggctgccgttgagcatccgcagcttcatcatttcaaacggcacgacgtcttcaacaaactgcgcgccgactttatcccacgccgggcggccgctgacgaagctatcttcaatcacccactggcggaacggttcgcaggcgatggcgcacggatcgtagaccccaagctggtcggcaatctcctgcagcgtttccggcgtcgccgcgggtacgatgcggtcaaccatggtgcacgggaaggtggcatgggcttcaatccacgccgccagcagcgggtcgcgcgcctgggccaggccaagcaccgccactttcgccacgtggccattctcgcggacgttatcgcaggacatcaccgtaaaggcctcaagcccctgttcacggcgcaggcgcagcgcttcgacaatatatcctatggcggatttcggcgtcgtcgggttggcgaggtcgtgttgaatcagcgggttgttgagatcgagctggccgctggccgcatcggtgcagtagcctttttcagtgaccgtcagggagacgattgccgtgtgcggacgcgtcatggcgcgcagaatgccgtcacagccgtcgatttccggatgcagcgcctctttcatcgaaccgataattttcagcgcggtgctgtcagcgcctttttccgccaccgtgtagagcagctgctgatttttcagctgttcaatcagaacgcgatcgttgcccggcatcaggttgacttcgcagatgccccagtcgctgtcgctggtttccagcagatgatgggtataaagcgcctgatgcgcgcggtgaaatgcgccgcagcccaggtgaacgatgcgggattccaggcgagaacgatcccacgcggggcgcgtcaccggcaggttgctgtcggcaatggttgcagtcatagcaaactccagagtgggccgcaaaaggcggccgaagaggtaaaggcgggacgtcggccccgccagtcaggaattagcggctaaaaaaagcgcgctgaatcgccagctcgacgccgcgaacttcagccagccctttcaggcgaccaatcgcggaatagccggggttggttttctttttcagatcgtcgagcatctggtggccgtggtcaggacgcatagggataagatcctctttgccttccgctttacggcggtgctcttcttcaacaatcgctttcaccacttcgtacatgtccacgtcgccgtgcaggtgagcggcttcgtggaacgttttcgggttctcttcgcgcagcgtagagcgcagatgggtgaagtaaatgcgcgggccgaactgcttaatcatatccacaagatcgttgtcggcgcggaccccgtaggagccggtgcacatggtaaagccgttagccatgctgttcaccgtgtcgaccatccactgcatatcttcaatggtcgagacgatgcgcggcaggccgagaatcgggcgcggcggatcgtccgggtgtaccgccatacgtacgccaacctcttcggcgacggggataatcgctttcaggaagacggcgaaattctcgcgcagcgcggctttatcaatatctttataggtggcaaggtgctggcggaactggtcgagggtatatccctcttccgcgcccggcagaccggcgataatgttgcgggtcaggcgcgctttatcttcatcgctcatggcggcgaaacgctgattcgcctgagcgacctcttcggcggtgtagtccgcttccgcgcccggacgcttgaggatatgcagttcaaaggcggcgaattcaatttgatcgaaacgcagggctttggagccatccggcaggacgtattccaggtcggtacgggtccagtcgaggaccggcataaagttgtagcacacggtacggatgccgcattgggccagattgcgcaggctctgctggtagttagcgatccacttggcgtagttgccggtatgggttttgatctcttcgtgaatcggtacgctttcgaccaccgaccataccagcccggcggcttccacgatggctttacgcttgaggatttcgtcaaccgtccacacttcaccgttcgggatatggtgcagggcggtaaccactccggttgcgcccgcctgacggacgtcagctaaagtgaccggatcgttagggccataccagcgccatgtctgttccatgcttaacctctttcacgttattgacctgcttcaggccgctgctttgatggtagcgtcggttccggtcaaccatcgtaacggaggggaaaccagacgatatggcgtataaattcctccaattggtcgaacatgtcaaccatgaatggcaaattggtaaaccaaagtgtgacggagatgcgtgaaggggagggaacgttaaacagggcggcattgttaaaccgccacggggcgcgggctgattctgctggcgttagtgttaagcatttttcatgtacttcaagagattactcagaaccggagaagtggaattcttcatgggcatagggccagtgcgcggcgggtagcgatgtgttgcgaaatggttaaccaatgtgccaaacctatcgaccagaagaacggaggcggtcattgataccggccggagcgcgtacggactcgcagcagatcacactttttgattattacgatttccatataaaaactacgtgttatcattccgctggtaaataccttttcaactctcaccgaggctttgatgctggagaatgtcatcatcagataatcagcttcccgaccttttcaggccggactggttatcgctgcgcttaaaccttacgcgaacacctgcgggtgttggctcgtttttacgcatgatgattaacaggtttcttcagtatgaatctatcccgtcaggaacaacgtaccttacacgttctcgctaaaggtggccggatcgcgcacatccgcgatgcatcaggccgcgtcacctctgttgaatgctacagccgcgaagggctcctgctcagcgactgcacgctcgccgttttcaaaaaactcaaaaccaaaaagctgattaagtccgtcaacggacagccctaccgcatcaataccaccgggctgaataacgtccgcgcacagctggacaatcgctaaggagcctctgatgacaaaccacagcttcacttttcatgtcgcctctgaaggcgataccgatgacattctcgacgtcgaaacccgggctttcggctacagcaaagaggccaggctggtggccgatttgctcaacgatgagagcgcctgcccgacgctatcgctgctggccaggcataacggagaggcggttgggcatattttattcacccgggcgacgttcaaaggggagccggactcgccgatgatgcacatccttgctcccctggcggtggtgccggaataccagggcgtgggcgttggcggagagcttatccggcacggcattgagcagttgaaagcaatgggaagccagatggtatttgttctgggccacgccgcttactaccccaggtacgggtttgagccatgcgcgggagataaaggctatccggcgccttatccgattcccgcggcgcataaaggctgctggatgctgcagccgatttcgtctcagccgctgggacgaacgggccagatacagtgcgcccgggcgttaatgaaacccgagcactggcgcgagtaatcaataaggagatgatgatgactattggcacgattattaccggttccaggcatatcgcgttgtcatcccgggagcgcaaaatcccctgggatgaaccggcttttagccagcgtatgctggagaaccatctgtcgcaggagcacgactgggccagccgcaggcggtcggttatcgaacaacaggtcgcgtggattgccggacagctacccgccggcgcgcgcattctggacctcggctgcgggccgggcttttacacccgcctgctggcggagcgcggcttttactgtacgggcgtggatttttcgccggcgtcgatcgcctgggcccggcagcaggcgcaggcggccgggctggatattgcctatcaccagcaggacgttcgcgagtacgcgccggaaacccagtttgatttcattatgatgaccttcggtgaactgaacgtgttcagcgcggctgaggcccgctcgctggttcatcgctgcgcgcagtggctggttccgtggggaaagctgctcatcgaggttcatacctatgctgaagttaaacgtcagggaatggccgatcccggctggcagcgctgtccgcaggggctgtttcttgatgttccgtacctgctgctgacggagcacgcctgggatccggcggctcaaaccagctccacgcggtttatggcgattgaagagagcggcaaggtgacgcgcttcggcagccggatgaccgcctggcacgatgacgcttatctcgacctgctgcgcacggcgggtttgaccaccattacccgcccggatgaggtggaatggccggtcagcgaaacctttaccggcaagctgtacgcgctgctggccgaaaaaaacgttcccgattctctttccgcaaaacccataaaaggaattcaaccattggatattccacgtattttcaccattagtgaaagcgctcaccgcatccataacccgtttacgccggaaaaatacgccgctcttggccgcgcgctgcgaatgaaggccggaacccggatactcgacctcggcagcggatcgggggagatgctctgtacctgggcgcgcgatcacggcattcgcggcatcggcgtcgacatgagcgcgctgttcagcgagcaggctaagctgcgggcagaagagctcggcgttgccgaccgcgtgacgtttattcaccaggacgccgccggttatgtggccgaggaaaaatgcgacatcgccgcctgcgtgggcgcgacctggatcgccggcggcgtcgccgggactatcgagctgctgagcaaaagcctcaagcccggcggtatgctgctgatcggcgaaccgtactggcgccaggtaccggcaacggaagagatagcacaggcctgtggcgcctcttcgctcgccgactttctgacgcttgccgatctggtctcctcttacgatgcgcttggctatgacctcgtcgaaatggtgctggcggaccaggaaggttgggaccgctacgaagcggcgaaatggctcaccatgcgccgttggttagaggaaaaccccgatgatgagtttgtgccagaagtccgggcggagctgacgatggcgccaaaacgccatgcgacttatacgcgtgaatattttggctggggcgtatttgcgttaatcaagcggtagttgaaagacccggcatagcaggaaggctatgccgggatcaggggggcagaacggcaggaaagggcgtccctggatgttctcttgtcagtttacgcattgcccaggacagcagccggttagcggcgaactggccatattcattacgttttcaggataatttcttggggatttctggcactgaatgcacgtcaatttgactctgcgtactccctcgctaattatttttttccgggctcacaaccatccagacagcaatacctataatgatcgccccgataacaaaaccattgttaacggtttcgttcagtaccatgtatccccatagcacgccaaatggaggaattaaaaaggtcactgttaatgaacgtaaggggccgatatcagcgataagccggaaatagagtatgtaggcaaatgcggtacagatcgctcctgcggcaatgacgcttatccatgcctcttgctgtaaccagttaacggtcggtccactatgggtgctccatataaaaaagggtagcaaaaaaaaggacgcacctatctgactaccgaaggccacgattttaggatcgagtccacctttgtttgaaatccagctacgcgtcagaaaaccggcggtcgcatagcaactggtcgcgatgaggcaggcaataacgacggcaatttgtttctcagctgacaggggttcaccaattgtggcgatcgcgatgatcccgacaatgcccaggagcatgccagcccattttctgaaggttaatttctctgcaaaaaatgcaaacccaatcaccgcccccatcaacggcgttgttgcattcagaatggctgaatacccagccggtaaccatttggcagccaggcaatacatcaggaagggtaatcctgaattaatgacgccaagcatcactgaggacttaaatttatctttaaagtcaaaagaagatttaaagataaataaaataaccgcgaggcctgtggaaccaaaaaagacgcgcaaaaaagccgtgttaatagcgccaaactgcggtacggctatgcgcataaagagaaaactcgcgccccagatagcggcgagcaacaataaccgaagataatcagcaatgcgcatagcggttccttttatttgaatgagaagtcacaacgcaactgtgaaacagggcgggcgtactgacaaacaagatttttgtttatacttaagcttttctaattcatgaagtcgtgtagccgatgaaaatgccacctttacacgcgcttatgtgttttgagtctgcggcaaggctgatgagtatgaaagcggctgccgatgagttatgcgtaacatccagcgcggtcagccaacagattgcgaagctggaaagcatgacgaacagccggttgttcatccgtagtcctcgccgtctcgaactgacaaccgaaggacgcatctatctgcgggcgataaggccggctttcaatcagatagcagaagcaacacagcgcttaatgaatgaaggaaaggcaaacaaagtgacggtcagttgcacaagtggttttgccatccaatggctcctgccgcggctgcctgcatttgaaaaagccaacgcgggcgtggaagtgcaaatcagtacaaccaacaggcaggttgatttactgtctgaagggattgatttcgccatccgacacggggctggtgactatcccgggctggagtctgagtgcctgataaacgataaactcctcccggtctgtagcccccggttaatcgcatcagaggacgagctctcatcaccgggcgatatggctgaatacacgctgctgcacgatgaacaccggctggactgggctctctggtttcgtgctctgggtattagtaatttgaagacagacacggggcccgttttcatcgattccaacggcgtgattgaggccgcaatcgcgggcaaaggtatcgcgctcgtgcgcagttctcttatttgtgaagaactgaagagtggtttgctgattaacccgctaaaaataccggttgatacgccgattgcgtactatctggtgtacgacgagtccgcggtcttgcagaagatatgccggcgtttccgtgactggataaccacgaccgcgaccaaagaatttcccgcgatagacaagagggctaaataaagaagctgactccagttctgtccgtactctctctgaatcccctgtggcgtggggagtaaatggggagatattcgtctccccgctgaagacacgttgctgctcgaatacagcagacctgacggcggcagcccgttttatcagaatttgacggtcacctgattgccgagcacccaggcgtttttaatctcttcgcttcctcccggatgaacgagcagctgcaggttagggcgcacggtcagccatggcgtcgcgcgaaagctataatgcagctctgcggcatactcggctctgcgaaccggaacatacagagggttatcataatcatcgatcccccgcatctggttcaggagctgcgcccgacgggcgactctgtcgttggcgtgcattttactgacgccgaagctgataaagtcctgcggacggctggcgaaagggccttgataaatggcgccggcctgaatctgatagtccattgtcgccgtatctttatcattcattgccagatgcccgaaaaggctaaggccacgttggcgctggctgctcgagtaggtcagctgctggacgacatagagataacctccgtagcggccgtcgtgtcgccgggcggcctggtgcgtgagcacatagggatcgccattgtcatcatccagcacatcattggcgtccgccgtgttataccatcccccgagtttccagatgccggggagttttgccgcgccgagagtaggtctatatcccagttcaaaaaggtacatgtaccccagatgcccggtaccatccagctggaagcttccgtggcgggtggcgtaggcaggattgtactgaaacgcgccggcctggacgtaaagggctggggcggggctgtatttaatacggccgccccactggcctatgggggtgttataccagacgccgctgccgtggccagctaaagagccgcacagcgacaggttttgaaaaaagcagccgttgttatcaaaatcctctcccggcggcatcaggcccaccttgagatccagctttttatcccacccggtttttttgaaccaaaactgcgtcgcgtgccatgtttgcccccgaccgtagttgctctgaacaccggagcctattaccggcgcgcgcggatcctgaaggcgatcctgagtcagatctcgcccgttacgattattcaccgacgctttaaattcaccgtcgtgaatacctaaaatcttttccagatccatatttacgccgagaatatactggtcgctgtagcgcagggttttatcgcgatcgtaaccgccggagatattcgtggccgtcattgcgctatattccagcgtaaaatcataaccatgacggcgcagatccgtacgcacgcctccccattctccggtcatgttttttgcggtgggagaaaaaagcgtctcgttggccagcgtctgtaaagggtgtagtaaagccagcagcatcgtgccgctgtggatgagtttgttcatgtttttaccgcctgttaatgatccaggtctatgaataattcccggtaaggcgcagctgaatcagccgactgcgccgacctcccgtcagaggtggccccgcgcttcccggagccacaggccgtctatggcgacagctcttctaacgattttcctttggtttcaatggcaaaaagccaggtaattaagccgccaatcagcgcaatgaccgcgaaagtgataaacacaaagcggatcccgaagccgctgacgataaaaccgaccatcagtgggccgatggatgaccccgcccggagccatgcgctggaatacgcggtgccgatagcgcgcagtcgggtgggataaagctctgccgcgtacagataaagcgagaaagcgatggtctgcagaatggcgtaggtcaggctgcccagaatcagaatttcaacggcggatttcgcgcccagaacggagagcgtaatcagcggaacgatagccagtaaaaaggcccatgtgtaccagcgtttgcgcccgacgcggtcgatcatcaaggcgcagatcactgaagccacgacgccgcaggaagaggtgatccagccgtaggccagactggtatcgagggagaggttaaaccaggttttgtagagggttggaaaccaggtgatcattccgttgttgacgctataaaccgtcagccacagtccccagagcataaaggtgcgggatttatagataccgccaaagagggctttaaccccttccggagccgctttttgcaccgcgggggcttttatttccggttcgggcaacgtcatcccgcgcctgatgacctctgattccagcgtcgatacgatgctgtccgcttccttcagcctcccttttgctgtcaaccagcgcggtgattccggcatgagccagcgaaggggaacggtcagcgcggaggggactaagccaattaaaaacatgaccttccagccatagatgggcaccagaaaataccccaccaatccggcaaacatcatgccgatagggaaaatcacttcatacaacaaaaagaaacgcccgcgctttttggcaccgacaaattcattgatataggcgctggcaacggggacttccgcaccgatacccaccccctgtaaaaagcgaataacaagaattgaccagccgttccaggcaaaaaggcaggccgcatccatgagtacgaacatgatgatggtgatacgcaatacgccgatgcggcctattttttccgccagcgagccgaaaaacagggcgccgcacagctggcccacgtagctggccgcaataataagaccgacaaacgtcggcgtgagaccccactcctgggtaagctgggggagcgcaaaagcgatagcaataatggtataggcatcgaaaaacgtcgataagccgacgataacgcggatcgctttcagccgtcgggtgatggggaggcgttccagccttgccagcagcgcgtctggcgtggacgccgttccgctggcaacggcgtaatctgaagcaatggcctgagttgacatagtattaccctgttaaacgttgtctggggcatacacgtaaggttctgaataaccacagggcaacgaacccttattcatcgacgtgctgcatataatgctgtcctgatgtgtttatgataacgttactgcaatcgatttcacttgcagctaatcctttgctggattcgccgctaagtcaattacgcctgttgtataaatgtcgagcagttcacaatctgaaaaaactcacgcgcaaaaaggcgaagcggtgaatgcaaagcaaaatggataagaaatgtgaattaacgacctcccgaatgaacccggcaaagtgaagcaccattccttttgtccgggcgaggtttgacgtaagatcctttaaccccacggtttgcacgatggtatccgttgaacgggcaacacggatttttacccgcattgatgagttggagcagcagatggatcaagaaagtgaactgaacgatttgccggaaaaaaagctggcgacaatgcgggatgttgctcgcgctgcgggcgtgagcgtctcgaccgtttcgcgcgtactcgatgaacggttacccacctcgcgcagcgcctcggcagagaaaattcgccaggtggcccgtgagctgggctaccgtcgggactatgttgcttccagcctgcgccggggcgataccggaacgcttggcgtcctggtgccgaggctgaccgatgccgttacggcgatgcttttcgaagagatagccagggcggcggccaggcgaggctatttcgcgatcgttgcgacctgcggtgatagcaaggatcaggagaaaaacgccgtggaatcgctgctggatcgccgcgtggatgggttgatcatgtccacctgccggctggacgatcctttgccgcaaaccctgcgtgaacgggatgtgccccacgttctggcgctgcgtaccgacggttttagcccctcatcggtcggggacgatgagcttggcggctatctggctacccgacacctgattgatttaggccaccgcgatattggcctgattggcggccctgattttgcctccaacgcgcgcaaccggcgtaagggctttgagcgggcaatgcaggaagccgggctcaggatcgaagcggaatggtgctgtcattcagattttaatatcgcctcgggggagcagcagggaatgaaaattctcagccagcctcatcgcccgagcgcgctatttgccgtcaatgacgaactggcgatcggcgtcctcgcggccgcgcaccagcaggggctggtgattggcgaagatctctccctggtcggctacaatgatattcccctggtgagcagactgcccgtggcgctgacctcggtcagaacgccgctggagcatatcgccagcaatgcggttgatatgttattgaatccagagataaataataacatgcggattaccacgccttcccttattccccgtaagtctaccgcgtctccacgtaaataatccccctgtgatcctccccgactttccaggagaaagcggggagggttgaattttgtataacggatctcatcccggatgcagatcgcggtttagtttgtgatctgcgttgcatttttaaccaacatggcgttgacggttttatttttgaggttcaatgtcaacgtcgtgaaaacgattgcagaaacgatttcacttccgtttcaaagaatcgcttaaccgtaaacaaatgcttactcatcaaggggatatttatgattaacatcgatctgagaggtttgactccggctccggttacacccttcactcgcgatggacgcgtagactatgatgccattcagcgcctcggcagctggctgggcagcatcgacggggtgaaaggtctggtggtgctgggacacgcaggggaggggacttttctgacccaggaagagcaggcgaatgtgatccgcgcgtttgtgaagtccgtggatgataagcttccgatcattgccggcatcaccggggaagggacggaagtggctgcgctggaggcgaagcgcgccgttgccgccggcgcatccgccggtttgctctatccttcccacggctggctgcgctttggctatcaggatggcgcgcctcaggatcgctaccgcgtggtgtacgaagaaagcggcctgccgctgattcttttccagtatccggatgtcactaaagccacctacaacctgaaaacgctgctggatatctccgcgcagccgggcgtatttgccatgaagaatggcgtacgtaatatgcgccgctgggataccgaaattccggttattcgccgcgagcgtccggatctgcaaatcttaagctgccacgatgaatatctgctgcataccgcctttgatgtggatggcttcctggttggctacggcaatatcgcgcctgagccgttaattgaaatgattaaggcgggtaaagcgggcgattacgttaaagcgcgtgagctgcacgaccgactgctgccggtgaccaaaagcgtctaccaccgcggttcgcacatggaaggtaccgtggcccttaaacatgctctggttgcgcgcgggatccttgaacatgccaccgttcgctcaccgctgctgccgctcgaaaatggcgctgaaaaagagatccacgacgccatgcgcgccgctgagctgggccgcgtcggttaatttattctgcgtctgttgttaatccgcaatgcagaaatatcgcttactgtattgcggatcatcggttacttcgccccggtattttttgctgctcttcatcataacgtcggggctttcacctctgtatattgctgggtgatttatgaaactattaagctttcgcgttaatgataaaaacaaatatggcctggcgaccgctgacggcgtcatcgatctgcaggcgcggtttcctcaatatagcagcctgctggaatttataccgcatcttcatcttgttgatactctgccgccgtctgcgaaacaggcgaactattctttcgacgagatcgctttcctgccggttattactgaaccgaaaaaaattatctgcgctggcgtgaattatcgcgataaaaacgctgccggtaacgagaagccctctaatcctgtgctattcatccgctttgcggattcacagaccgggcatctggcaccgctcctcaagccggaacgcagcaatcagtttgactatgaaggcgaaatggcgctggtgatgggccgtggaggacgcaatataccagagcaggaggcgctgcattatgttgccggctacagctgctatatggatggctccgtgcgcgactggcagcatgcctgctttaccggcggcaaaaactggccagcgacgggcggcttcggcccctggctggtgaccggggacgctatccccgacccgcaaaatctgaatattactacccgactgaatggccagacggtgcagcaggataatacgggcagcatgttgtattcaattgccgaactcattgcgtatatcagcaccttcagcgcgctctctccgggagatgtcattctgaccggcacgcccggaggcatcggaaaaaaacgtaccccgccgctctttatgcagcccggggacagggtggaagtcgagattgagcagatcggatgcctgatgaatagcgtgcgcagcgatgccgcggtagcgcgataagttatcgttttgtatctaaaaacagggtgagagcgcgtttgcccggcggccaggacttgcaggccatttaatcatgtaaagggttaatgccggacagggagccgtggaggcaatatatgatattggttcagtttctggtggtgctgctgtttctgtacatcggcatgcgggtcggggggatcggcgtggggtttgccggcggcgccggcgtgattgtcctcagcgcgctcggcgccacgccgggtgatatgccgatgctggttatcgtatttatcatggtggtgatcgtggcgattgccgccatgcaggaggccggcggtattgaataccttgttgacctcaccgagcgcctgctgcgccgctatccgcgattgttagtcatcaccgcgcccctttccacctggctattaaccatgatggccagcaccgggcaggtctcttttgcctgtatgccggtgattgtcggcgtggcgaaagagaacaatataaagcccacccgggcgcttgctctttcggtcggcgcctctttgctgggcattgtggcgtcgcccatttctgcggcggtgattttcttctcggggattctggaaaagggccattctggctggggctatattgagcttatcgcggtatcaatcccgtccacctttctggcgctgctggtcacctccgttttttacctgtgctgggacaggatccgccagcaggatcggctcaatgacaatccggttcaggtgcaggcaaggactgcgcgggcgatcccgccctgcgccggtcgttcggtgctgatttttatcgtcgggctggttgtggtgctggtttatgcgattgtcaccagtccgaaactcgggctgattgcccatccggtcatgagcagcggacaggcgcgggtaggagtgatgatgggcgttgcgctgctgattgtggtgtgctgccgggttaacgtacacaaggtcccgtccggctcggtgtttaaaaccgggatgacctcctgcatctgtattctcggcgtcgcctggctgggttcaacctttatggacagtaatcaacagtggttgcaaagcgcggtctcgtcacacttgctggattcgcccatgatgctggccattattattatggcggcctcatgcttcttgtattctcaggcggcctccacaaaaattttattccccgccgcgctgagtatgggcgttgccccggctattttggttgcctgcttcccggcaacggcttctctttttattctgccaaactatccgacgctgctggcggcggtagagctggatgataccggctccaccagactgggccgacatattatcgatcacccttttctgctgcctggcctggcatcggtcctgctttcaatgctcttcgccgcggggctggcttattggattcagtgaatcgcctgaggcttttactttgaacacatccgaaaacaaagcggttcaccgtcggtgaaccgcttttttcgatatcaggctgcaagatctttcatcacctgaataaatgcctgagagacagattcttctttatggtgatgcccatcctcaatcacccagcgtccgccagtcatcaccgcggtaatgggattagatgagcaggcgaagatccagcggttgagcagcatctggtcttctgcgctggcgataaagggattctggctatccaatacgaccagatcggcccgatatcctacgcttagctggccaatgttttggcccagcgctctggcgccgcctcgtagcgccccttgatacagcacgttgccgacgtgaggctcgcctgggacgatgagccggttacggcgctgggctatcaggcgctgcccgtattcgaaccagcgtaaatcctcgctgacgctgacgctaatgtggctgtcggaaccaattccccagacgccgttatgctccagatattgtgggccagggaatatgccatcgccgagattggcttcggtggtcaggcacaggccggccaccgcaccggatgtggcgatcttcatcgtttcctgaggcgtcagatgagtggcgtggatcaggcaccagcgcgaatctacggggagatggttgtacagccactccaccgggcgctcgccggaccaggccaggcagtcatccacctctttttgctgttcagcaatatgaatatgaatcggttgctggccagggtggcaggccagaatggcgccaatctgctccggcgtaacggcccgtaatgagtggaagcacagaccggtacgctgcattggctcgccggccagccgcgatgtgagcgactcgtacattgtcaggtagctgtcgctatcgttgataaagcggcgctgtccaacggagggcggctgcgcgccaaacccggcgtaactgtacaggacgggcagcagcgtcaggccgatgccggtatgtttcgccgcgctggcgatacgcagcgctaattccgtccgctcttcataaggcgcgccgctgctgctgtgatgcagatagtggaattcggcgaccgaggtgtacccggctttgagcatttcgatgtacagatagctggcgatggtttccagctgttctggcgtaattttatctaccagcctgtacatcagatcccgccaggtccagaagctatccgacgggtttcccgccacctccgttaacccggccatcgcccgctggaaggcatgggagtgcaggttcggcatacccggcacgacgacacctttgatgcgcgtcgcctgcggattcggcgctgcgttcttttccagcgcggttatgatgccttcttcggacacggttatgccgacattatttgcccagccatcaggcaacagcgctttttctgccaaccagactgccattttaccaccttattatcagtgctaatgtatatacatgtacatatatatacatctaacaggtcatagagtaaactgacaacgtcagcatatgaggaatggttaatggcgcgtaacgacctgtcaaattcggattccatggatgagttacttgaacatcccgcccccttttatgaaagggtaaaggccatgatcaaaaccaagatccacagcggggcatggcccgcgaattaccgtgttccttctgaaagcgaactggtcacgctgtttggctatagcagaatgacgattaaccgcgcgttgcgagaactgaccgcggagggcttgctggtgcggatgcagggggtcggtacttttgtcgccgaaattcgcggccagtcggcgctgctggacattaacaatatcgctgacgaaatcgccagccgtggccatcgccaccacgccagagtcttcagactgacggaaatcgaagccgatgcccagcaggcattcagcttcggcatgcagcagggttgcggtctgtaccattcgctgatttgccattatgaaaatggcgtaccggttatgctggaagatcgactggtgaatatgcaggttgtgccggactacctgcagcaggattttacacgtatcacgccgaacgcctatctctcctcaattgccccgattgttgaaggcgaacacgttattgaagcggtcaacgtcacgcgggccgagtgtgtttacctggaaattgatgaacatacgccttgtctgctggtcaatcgtcggacgtggaccggccgacaggagaagaaaatcgtcaccagcgtgcgcctggtctatcccggtccgcgttaccgcctggaagggagcatgcgcaaatgatccgtctgctccctgccgggttgtatacggaaatgccctggaaaaacggccagggcatgacgcgcgaagtggcccgctatccggaagcgggggaatatgactggcgtatttccctggcgaccattcgccagcctggtccgttctccgcatttcccggctacctgcgcaatatcagcgtgctggaaggcggcgggatgtacctgacaatcgatgggcagcgcagcgcattgattgcgcctttccaggcgctggggtttaacggcgcgagcggcgtatcctgtgagattgtcggcggcccgctgctggattttaatgtgatttaccgggaagccgctctgcgggcgacggtgagctggtgtggggcaggaacgtggtcgcatcagggcggactgcggatattgtttaatgccgggcccgcgctgcgggtgagcgtcggcgaccaacgctatttactggaacattacgacagcctgctggtggatgaagcggtggcgctggttatcccggactctccgggcgcgcgtctggcccgcatcacgctgattcccctttaatcacgccgcaggctccttctgcggcgcctgttgtcactcctcttcgcacaatgcctgcagcatcgcgctgagttcgccctgatgaatcagggcgcgtagcgcatgtatatcggggtagagcagcgtatctttatcccggaacggcaccgcctgacgcactctctccagcgtcgcctcgctgcccacggcggcacgcagcgggcgatggaactccagcgcctgacaggcgcacagcagttcgatggcgacgatgtccacggcgttttctaccgccttaagcgctttacgtgcggcggcaacccccatgctgacatgatcttcctgaccggcgcaggtggataccgtgtggatactggccgggccggccagactgcggttatcgcccgccagcgcagcggcgacgtagggtgggatcatcatcccggagtaccccgaatccggcgagataagaaaggccggcagcccgctgagatgcgtattggttattcggtcgcaacgggcctgggaagcggtgctcaactgggcaatggcaacggccagcgcatccagcgccagcgccgttggcgcaccgtgaccgttgccccctggcatcacgataagcctgtcttcttctaccagaaacagcggattatcggtcaccgaattgagttcgatggtcataatctgccgacagtgggccagctggtcgcgcaccgcgccgtggatctgggggatacagcgtaaactaagcgcgtcctgaacccggtggtcgcgataacgcgccaggatctcgctgcctttcagcaggcggcgcaggttttgcgcggtttcctgctgtccgggatgagggcgcagggcgtgcaggcgggcatcgtagccgcgcgtattgccccgcatggcctcgaggcacatcccgcccgccatatcggcgacggggagcagacgctggaaatccgccacggccaggcagcccagcgcggtgatctcataggtgccgccgaccaacgcgtgaccctctctggggccgggaacatagggcgggatacccgcccgcgtcagcgcctgttgcgccggcagcagttctccctgataccagcatttgccctcgccgaagaccgcaaggccgatatgggctgtggcaatcaggtaaccgacggagccgccggcgggtgaccacggcgtgacctgacggttcaacatatcggcgatacgctgcgccagcgccggggtgacgccgctgtatccctgcagcagggattttaacgtcaccgccatcatggcccgcacttcacgcaccgtcaggtccggaccgactccgcaggcgtggctgcgcagcatattcagctgagtatccgtcatcctgtccggggacagccgggtggtgaccagatcgccgacgccggtcgtcagcccgtagattacctggccttgttcaatggcgcgctgaatacggctgctgacccgcgccatattatccagcgcggccttctccagcgcgatcggcgcgccgtcggcaatccgcactatctcatccacagtacccggtgcctgcccgagggtaatgctgccgttcagaggagttgtcatgtctgcgaccttattggctaaatccgtgttttaccagccactcatgcgcgatatcgtcgatgctgacaaattcggcaattttctcgttcatgtcgatcagatcttcagtcgttagctgagcagaaactttattcagcgtggtggtcacggcgtcattcagcgcttcactggcgacgattggcacaatattttgcgccgcgaacagatgttttgtgtcttccagcacgacaaggcgatcttttttgattgctggcgaggttgaaagcagatcggcgacctggacctggttatttttcatggcgctgagcgtcagcggcccgccgacgtccagcactttaaaactcttaaagttcagcccgtacacgtcgcgcaggccggagagcccctcatggcgggttttccattccgccgggccgcccagcaccagctggctggcaacaggctgtaaatcggcgatggttttcagtttatatttatcggcggttttctgcgtcacggccagaacgtcgatatcctgagcctgggagatctgcagcattttaactttctccggcagcttagcggccagctctctggcgacgtcctcactaccgtgtgccgcatttttcgcatccagatagctcaacagcgcgccgctgtattccgggatcagcgtgatggagccgtccagcagcgccgggatatacacttcgcggctgccgatgttcagctttttctccaccgggatgttttgcgcttctaacgcacccgcataaatggtgcccagcagttggctttccgggaagtctgcagaaccgacaatgactttcggcgcggcccaggccgatgaggtcgccgacagcagcagcgctgaacacagcgtcaaaatactttttttcatattcattgaggtatccttttgagcagtggaatgaggttatgggtttttaatacgccgggtaataccgggtgaaacgactattttttgcgagaaagagaacaagcagtcgatcagtaaagccagtagcgccaccagcatggcgccggcgatcatctggctgaaatcgttcgccgcgcgtccgtcaataatcagacgtccgaatccccccagcgagacataggctgcgatggtggcggtggaaataatctgcaacgtggcgctgcgcacgccggagaggatcagcggaagcgcgcagggcaactccacctgtagcaggatctgcagccgcgtcatccccatgccgcgagcggcatcaaggacatagggatcgagcgcgcgaatacccgcatgcacacccagcgcaatcggcgggagcgccagcgccaccagcaccagaatacagggcagaataaaggccatatcggactcaaactcgccggaaagtaaaatcaccagcagaataatcagcccaaatgagggcagggagcgcagggcgttggtggtaccgatgagcaggccttcccctttaccggtatggccggtgtagcagccgacgggaaacgcgatgataaaggcgatcgccagagcgacagcgctatagctgatgtgctgcgccagaagggggaaaatgccgccctcaccaaaccagtggatgggatccataaaccaggtaagcataattatcctctctgaggttgccagcggctgagttgacgagtggcgtaaaccaccagcatatccagcagcagcgccagaatgatgctgagcgcgatcccggcgatgatgggcgtcagaaattgcagctggaagcccagggtaaacagcgagccgagctgcggtgcgccgattaatgccgcgacggaaacgatactgacgttagacaccacggcaacgcgcaggccggaaccaatcaccggcacggccagcggcaggtcgatctggaaaaactgctgagcgggtttatacccgagcgctgccgcggactgacgggtatcggccgatacggagtccagcccgtcgcagacggtgcgaaccagtagcgcaaagctgtagatggtcagtgcgaccacaacattaatggggtccagaatctgcgtgtggagcagcgggggcagcagcacaaacagcgccagtgacggaatggtatagagtaggccaaacaggttaacgatcgccgacttgaccgatggcaggtggtgaatgccccagccgacagggatcgccagaattaaccctatcactaccggcacaattgcgagatagctgtgccagagaaacaggttgaagattttatcgctctgcgcccatagccaatcgaatctcatgctccctcctggcgcgtggatttacacatgtcgagtacttgatcgaggtggatggtccccagcgggatttgccgttcatcgacgatcacggcccggtggttgggcgagctcagcgcagcgtccagcaaatggcgcaacgggctcccttgctggtggaacgtcgcccccagattgatgttgtcgtgggtaattgctgttgccggctgatgggtgtcgaaccagccaaacgctttgccgttttgggtaaccagcagccagcggtcgatggccatctctttggcctgctcgaaggaacagtccagctcggcatagggctcgttgcgtaacccggtttctgtgtcggcggcgtggaaactcagtttgcgatagcctctgtctttgccgataaagtccgccacaaaggcgttttgcggcgtattgagcagttcgcctggggaggccatctgcgccagcttgccgccaggtttaagtaccgcgaccaggtcgccgagcttcatggcttcatcaatatcgtgagtgaccataatgatggttttgctcacctctttctgaatacgcaaaaactcttcctgcagctgttcgcggaccaccgggtcgaccgcgctgaacggttcgtccatcaacataaactccgggtctgccgccagggcgcgggcaacgcccacgcgctgctgctggcctccggaaagctgccaggggaagcgtttggcgatttgcggatccagaccgacgacttccagtaattccccggctctggctctggctttacttttggcggcgccgttgagaatcgcggtggtggcaatgttgtcgataatgtttttgtgagggaataaacctgcattttgaatgacatagccaatacggcggcgcagttgcacgatatccatttgctcggtggcttcgccgttaagcaggattcggcccgatgacggttccactaaccggttaatcatccgcaatgaggtggtttttccacagcccgaagggccgacaaataccgtaattttgccacccggcgctaccaggctaaggccatctactacgaccgaaccgttgtcgtagtgcttagtcacattctggaaggtaatcatcttcacgcctctgattgttgtgtgtggtgttcccgaatgcaggggagtcacgcgacaaaatgctgctatgtataatcttgtatgtacaactagcaaaacttgtgccactgccagagggatacgcaataagatggttatttagttattttaaaacaatcgcttatagtgtgtttgcgttatctggtactgccgtctatggcgagataagaagttatgacgagatagaaaatgcactagtgttatctttttgtgatgttttagtgcacaaaaataaggcagagagctgtatttttgcaccaaaatggcccatcatcacggtgtgttcacgagtgtatagcgcagcatgtccttctgtttttatgttaatttgttgaattttattggttttataaattaatttctaacctggcatccaatatgcttatcatgtatatacaattaaaatgcaaataacaaaactaacaattaattaacatatgacaggtaacggataagaaggtaaagcgcatgagtaaacaagcaacccgttttcgcgatgttgaaatcagagccccgcgaggcactaagctgaacgcaaaaagttggttcacagaggcgccgctgcgcatgctgatgaacaacctggatcctgatgtcgccgaaaatccaaaagagctggtggtgtacggcggtattggccgggcggcccgcaactgggaatgctacgacaagatcgttgagaccctgaagcagctcaatgatgatgaaacgctgttgatccagtccggtaaaccggtgggggttttcaaaacccacgacaatgccccgcgggtgctgatcgccaactccaacctcgtaccgcactgggcaaactgggagcacttcaacgagcttgatgcacaaggtctggcgatgtacgggcaaatgacggccggctcatggatctacatcggcagccagggcattgttcagggcacttacgaaacgtttgtggaagccgggcgccagcactataacggtagcctgcgcggacgctgggtgctgactgcgggtctggggggaatgggcggcgcccagccgctggccgcaaccctggcgggagcctgttcgctgaatattgaatgccagcagtcgcgtatcgacttccgtctgcgtacccgctatgtcgatgagcaggccagcgatctggatgacgccctggcccgcatcgcccgctataccgcaaaaggagaagcggtatccatcgcgctgcatggcaacgcggcggaaattttaccggagctggtaagacgcggcgtgcgcccggatatggtgaccgaccagaccagcgcacacgatcccctcaacggttatctgccgctgggcatgagctgggaagactaccgcgctcgcgcgcagtcccacccggtggagacgatccacgcggcgaaagcctcaatggccgaacacgttaaagccatgctcgccttcaggcagcagggcattcccaccttcgattacggcaacaacatccgccagatggcgaaagagatgggggtggaaaacgcttttgacttcccaggctttgttcccgcctatattcgtccgctgttctgccgggggattggcccattccgctgggcggcgctttccggcgatccgcaggatatctaccgcaccgacgcgaaagttaaagcgctaatacccgatgatgaacacctccaccactggctggatatggccagagagcgcatcagcttccaggggctgccggcccggatctgctgggtcggcctgggacagcgcgcccggctgggcctggcgtttaacgaaatggtccgcagcggcgagctgtcggcaccgatcgtgatcggccgcgatcatcttgactccggctccgttgccagccctaaccgcgaaacggaagcgatgcaggacggctccgacgcggtctccgactggccgttgctgaacgcgctgctgaataccgccagtggcgcgacctgggtttccctgcaccatggcggcggcgtagggatgggcttctcccagcactccggcgtcgtcattgtatgcgacggcagcgatgaagcggcggagcgcatcgcccgggtgctgagcaacgacccggccaccggtgtgatgcgccatgcggatgcgggttatgacatcgcgattgaatgcgccagagagcaaggactcaacttgccaatgattgcggactaatttctccggcgaaggggacaatgtatccccttcgcctcaccggagtgctgccatgaagaataacaacacaacatacatcgaaacacgttctattgaacccatccctgacggtgaacgccacggtagcatttttagccagttcaccctgtggctgggggctaacctgcaaatcaccgccatggtcactggcgcattaactattgtattcggcggggatgttttctggtcgctggccggtcttatgctggggcagattgccggtgggattgtgatggcattgcatgccgcgcaagggccgcagctggggataccacagatgatcagcagccgggtacagttcggcgtctacggcgcctgcctgccgattctgctggtctgcctgatgtaccttggctttatcgccaccggggcggtgctgtccggccaggcgatctcagcggttttccatactacggaaaccagcggcattctgctttttgctgccgccacgctggttatcgcctatgtcggctatcggttgatccacctgttgggtaagctggcgagcctggtggggattatcgcgtttatctacctgctgtggaaaatcagttcctttccggctattggcgacctgctgagtatccgaccctttagctggagtacgtttttaaccgccaccggccttgcggcttcctggcagatcacctttggcccctatgttgccgattattcccgctatctgccgcgcagcacctctcccgggaaggtctttttcgccgtcgggagcggttcggtgattggcgcgcaaatcgccatgaccgtcggggtgctggctgccgctctctcgcagggaaaactggtcggtcatgaggtggactacatcgtcggcctgggcggcaccggcgcgattgccacgctgttatatctgagcatcgcgtttggtaaactgacgatcaataccctgaatgcctacggcagcctgatgtgcctggcgacggtgtacagctgcgggaagcagcgagtgcgcgtaagccagtcggtacgtctgctggtgctggcgatgattattaccctggcgaccgctatcgcgattatcgggcaacactctttcctgtcggcttttaaatccttcctgttgttcctgttgactttctttacaccgtggagcgcgattaacctggtggattactatttcttcaaccatcaggcgatagacatggaggcgctgaacgatccgaacgggaaatatcgggcgtggaatgtgacggggctcggggtttatctcgtcggagtggcggtacagacgccgtttattgatagtggattctattccggcccattcgtgaagatgctgggcggtatcgatatctcctggctcattgggctggcgctaccggcggggctctactatgtcctgcgcaaagcgcagtccgcagcggcggctggcgccgccatcagtcgttaaaggagagcgccatgtataccctttggcaccactgccggatcgccaccatggccgctgggcattatcagttgcttgacgatggcgcgatgctgaccgacggcgcagtgctgttatgggtcgggaaccgggcagaattgccggacttacccgttgcgcagcgggtggatttgcagggcagggtggtcacgccgggactggtggattgtcatagccacgcggtgtttggcggcgaccgggcccgggagtttgaaatgcgtctcaacggggcgagctatgcggagatcgcggctggcggcggcgggatcgccagtacagtcaacgccacgcgacaggccagcgaaagccagttgctggagagcgcgcggcagcgtatccgggagctgtgccgggacggcgtaacggcgctggagatcaaatccggctacggcctggatctggctaacgaacgtaaaatgctgcgggcgatccgccgtttaggcgacatattgccgctgaccgtgcgcagtacctgcctggcggcccatgcggtgcccgtcgagtatcaggagcgggcagatgcctggattgactatatttgcgaacgactgctgccggaactgcatcaggaagggctggtggatgcggtggatgcgttctgcgaacacctggcattttcgccctcgcaagtggagcgggtctttcagaaggcccgggaactggggctgccagtgaagctccatgctgaacagctaacgctacagcatggggcggcgttggccgctcgctaccatgcgctgtcggcggatcatctggaatatttgtgcgaggaagatatcgccgcaatggcacgccatgggacggtggcggtgctgctgccgggcgcctattacttcctgcgtgagaaacagctaccgccgctggagctgctgcgtcagtaccgggtgccgattgccctcgccagcgatttaaatcccggcacctcgccggtgttgtccctgcgtctgatgatgaatatggcctgtacgctattccgcatgacgccggaagaggcgttggctggcgtgacgcttaacggcgcgaaggcgctggggctggatacagtttgcggttctctggaagccggaaaagaggccagcttcgtggcgtgggatatcgctcatccggcggagctaagctactggctgggaggctccctttcgaaacaggtgatttatcaaggtaaggaggtttattgtgattaaggcgtttgatttgcagcaggggaacctgccgcttctggtcagtatgccacacccgggaacgttattaacccccgaagtcgcccaggggctcacgccgagggcgaagcgtctggaagataccgactggcatattcccttgctctatcagaccatcgcggacatgggggccagcacgttatgcgcccgctattcccgctatgtggtggatatcaatcgcccggcggatgataaaccgctttacagcacggcgacaaccgggctgtttaccgatatcttttttgacggcgaagccctgttcgtgccgggcggtgcgcctgacgcggcggcgaaggacgcgatactaaaacaggtctggcagccttatcaccaggcgcttgccgctgaactggcacgcctgcgtgagaaatttggctatgcgctgttgtgggatgcgcactcgatcaaatccgtggtgccgcgcttgtttgaagggcggctgccggatctgaactttggtacggcggacggcgccagctgttcgacgcagctcagccaggcgctgctggcaagctgcaatgcgttcccgcagtatagccggatactcaatggccgctttaaaggcggatatatcacccgtcactatggcgatcccgccaaccatattcatgctgttcagctagaaatggcccagtgctgctatatggatgaggagagctttgcttatctaccggagaaagggcagcaggcgcaacaactgctggagaggttgattaatactgcgttgcagtggggacgagagcagtacggcgagcccggaatgtgaactcgtataaagctgaagacacaggcacccgaaaagtctgtaaaacagccgaaggcgataagaaaggtcaaataaagcgacggcttaccacctgcctggcttcttctgaagagagggggaatgcgggccgttagcggaacccccttatatccccgtctttctgaactgccccccttccttgcggaaaggggcttttcacaataccaggactgagcggaattcatgaaccgtcttctgcaggacgtgaggcggtcccgcttgctttcctcatcgcctggctgtactgccaggtggaaaccagacagaccagtaaaaccggtatcatcatcagacccagcagcttccagcccagcaaggccagcatcacgcccgctccggatgtggctatcgcggagaaaacaaagcggctggtttcggccagaccctgcgctttttttcgctcattatcacggtaggacagactgagcagcgtcgagccgccaacaaacataaagttccatccgaccccgaccagaagcagacttaagctgtatgccagcatcgtttccccggtcaggtttatcacgacagcggatatgttgagcgcaatccccgcgtacagcagaacggtgagccccagttttcgtatcaggaggccggtaaacagtgaagggacatacatccccagcagatgcagctgaatgaccagtgcaccatcattcatcgagtggtggtgcgtaacggagaggggggccgccgtcatcagaaaaagcataacgaaggagccaataaccaggtgaaaccaggccgtacgataatccggacgtttcattaattcccgactggttggcgatactcccgggatcgcccgggtgtccggggaggggatgtctctttttgaacgttcgaggaacagagccaggttaagcgcagacagaatccccagtcccgccacaacgagataaacaccggcaaagcgagggagaccggggatatcccgtgcaacaatcgtcagcaacggccccaggatagctgccacaacgccgccaatcatgaccagggagattgactgccccttcacttccggtggggagtgatcggcagcaaccagacgatagtactggctgaaagcctgatagacacctacgagaaagcagccggtacaaaaaagtaaaaaactgcccttcagcacagcgagaaaagacaataatccgcccgaggtaccgcataaggagcccagaataaacgcgagtttttcgtttccccgaccaatcatgccggccgcaaacagactcgagaacgcgccggcgactgtgatgagtgcaaatggaaccgtcgccagttgagcagacggcgccagctgatagcccaccagggtggcaatagtcagatcaacagacacggcacaggtaaaaaacagattactgactgcaaggataacggggatcctgccaggtatatatcgcatggtctcctcctacaggaattcccccaggcccggtaataaagcgtcatatttcgcgcttacccatttctgaattatttcgtcagggacaatatggttttcttttgacggaatgtgttcagggagagtctgcaatatgccaaaggttgaaaccgtttcatcagtataatattcgtcatgactggccgtaaaatgacttaataccgattccatatttattacctctccattgtgtgaaaaagagataaagcaagaatggtgccatttaaaaaaaggatttagcccgctttttccggggttcttgcaccgacggggagcaaatgtatcagccctggtgcaataaatgtaattgcatagagatattattaaaactaaaccagataaattatcttgcgctgcttttttgacatttaaaaaagaagggggcgcaggagttcgctgattcagctaccgatcttctcgtctaaaggtttgaatggttttatggcggccacggggggctcctgtctgttatgaaattgaactggggcgttcgatgtgtttgcactcaagtgagcatcgactgctgggcgaagatacccgccatcgcgccctgccatgttgccgtggtcacagagggcattccggggttggcgaggtcgccagcggcgtaaatgcctggcatgctggtttcgcggcgctcattggtcttgagtacgaggccggttggcgtatcaaccgtggcgagacccagggacttatgcaaacttgcggatggcctggtacggggatgtgcgaagaggatatcgaccgcgacagcggggccgttatcgagtcggacggtggacttatggccttcattaccgaaaatttccacgatcttgccttcaacgacggctttgtttcggcggacgaggtcggttcggatatcgggtgcgatgtcgtgaccatcggtaaagaccgtcaacctgtcggtccagtcatggaagagcctgacctgattgtgcgactgcgggccagaccagatgaggccccaatgctggtcggcgacttcaaagccgtcgcagtaggggcaaggtatgatggacgtcccccagccttcagcaaagccaggaatatcaggcatctggtcagtgatgccatagctcaggatcaggcggcgcgccctcaggctttcgttatcgtcagtgacgacgtagaaatcgtcgatggtgccggatacgctttcggcccgcgcattgaccagctcgatcgttggatagcgctccagctgctgacgtgcctcgaccaggatgtcctgcggcggcttgtggtcgtggccgagcacaccatgcgaatagccggcaaagcgattgcgcggccgatcagtgtcgaggaccgtgactttgcgacgggcgcgtccaagctgcagggcggcggcaaggccggcaaagctgccgccgatgatgataacgtcattcatggtgatgggctccgtgttttggatgcgggaagatggttgggtgtggcgcgccttgcgtatttgtgatacttattggtatcctaattatagaattaggatactgtcaaggactatatttcgtgacccataaaaacagtcagaccaggcggggccggcccgtcaacgaggcgcttggccaaaccatcgttgacgccgcgtccgaactctttttggaattgggatttcaggcgacgaccctggataaggtcgcccagcgagcgaagatatccaagctcagcatatatcggcacttcgagaataaagaggcgctgttcagtgcggccatcgtggccggctgcagtcagtcgtttgcaccgcaagtccttctggaaggcgttgagggttcggtcgaagagcagctgatggcggtggggtcattactgcttcgcacgctgctgagatcggacgttcgcggcgtcgaagccatggttacggccgataagaagaatcaggcatcgttaagcaagctccattacgaagccggccctgctcatgtcatcacccaggtcgaggcttttttgcgccagctgcacgcaaaggcgcttctgaacgtgcccgatcctcaccagtccgctcgtttgtttgccgcgcttttcaaaggctccgaccttctgatgatcgcgcgcttcgatgaggccagagcagaggacgacgacgaaatcgaagcttattgtcgctcggccgtcgccatgttcatcgccgcgcacggtggcactccgggggcgctatcgcggccgtgatcttgcctggtatttaaatttatatatctttacaattgatgtatatttttaatgtatttaacaatttaatgatgtactgctactggattgattgagagaaaagagagagaaaagaaaattttcaatatgaaaaaaagctcagacggtcattaaagaatttccttctaataaaaaatattttttatacacatttaattgcttattatttttaagcataggtaattactttttaattaatatttatgtgcaacttgttatttaaaaaaaatatcgatatccacttattaaggaaaaaaacacgtctgttcagtaaatctctttatatttcagggtggtgcgcgtaatttttcgacagtgagtcggtgcgttactgctttgctcccggggatggaataacattcgataaagacgtattccataaaagtaatcgatttttaccggggccttagttatcacgtcgcgcatttataatacgctttattgatgtacactctcgctataaccaggtgaattccgataaaactgggagtgatgtatcaattctggttaacaaaatgattgttggtaatggtaatcactttggtatacaaaaaggaacggttatcagaacaacatcagaggaaaaaaatgagtacgtatatcatcaagagaacgggtaatcggtacattgatatcagtagcggcaagacaattgatgcttattatccaaatggagacatgaataagcggtcctgtcttgccgttaaatataaaattatcgtctgcgaatccttcgaaattgagacagacatatcaaaggatatcacgtcaacagaagatgcttatctccgtttacatcttctttcatcccgtgaatacaaaccgaatgaaataaatctggaaggaatttttcagcacctgccaaatgtagcctggacgagtgcaggccctgtattcccggaagatgtacaacgtttacgtcaccttattgcggatgattatcatcagcttaccgtattcagcgttgataaatttccaaggatggttgactacactataccttctggcgtgcgtatagctgatgctgaccgcgttcgtctgggtgcctacatttctcagggaacgactgttatgcatgaaggttttatcaactttaatgcaggtacgttaggacaatgcatggttgagggaaggatcaccccgggagtaactgtcggtgatggaagtgatgtcggggcaggtgcctcaataatgggaaccctgtccggtggcggtaaacagaaaaatcagataggtaaaggctcattactgggggctaatgcagggatagggatctctctgggagattcctgcattgtggaagccgggttatatgtgacgtcagggacgaaagtgacgctgccggacggttccgtcgattatgcacgcaatttgtcaggcaaaaacaaccttctattccgacgtaacagcgtgactggtagtgttgaagtgctgacaacagacagcagtgtatggggaggagtaaatgccgttcttcaccagaacgactgacgccctcaatacttccgcagaccgcgtcgcactggttagtggtgcgacgggggaagtagggcaaagaagtgttaagttgcccacgcctgttaaaccaggactttcccggccgcggcatacgctctcccttccggcgctttttcgtcgcctcgctgtaaccccggctgcgttgccactgcgcccattccaccagtgcatccagccccatattgctcatcattgccagaaaatgtcgccgtttataatgcagtccacaaacgacggccagatttcggtatacaacatcccggcaagcggtgttcccgccagcgggcaaaatccccccacagttcggcgcgttgcgtgcctttgaacggcgtaccggtggtctgcgaaaagttcttccggcagtcattgcactggtatgaaggtttctgcccctcgcgttcacgcaccctgaatgactgactctgacagtatgggcagcgatccggctgctgaaaggggcgataagtcagctactgcaccagcctgcgggcgtcatgctgcgttcagggggaataaaccgttgccagttatcagccagcatcgttgcgctcccttaaccgccccacatgtattctggcggtctgcggcaaatcctccgcgggcggccgctcatctagccccagcataatgttgtaaccggaaaacaaccccaggtcgcccagacgcgggcggggtagcagccctgtgggcaacgtgagccagagtcgcacatcgtagtcgcagccgagatacgttcgcatcagcgtgaagacatccttcttcagttgcccgtccggcatccagcccctggactcatccggatcgtcggtgtacagctccacagcggagcagtaattcacgtcgctgatttcatcgccgagcaccagatgctccccctgtgttctgctgttatccatcgacaactgcgcgtgctcatccactggcatcagtaccgggtaatgaggtttcaccttcaccagcgtgaaaggcgcctgtgagcggataacggcggcgataccctctgcggtgtgggtggaatgcagcagcgacggcagtattgcaagcaggtgtgaagccggttgttcgcgcgggcgggcgatgccggccagcgccatcagataccgtgatgtggcatctgtgccacccggctcaaaggttgccgggtagttgtacttacgccagatacggtaaaactgcgtcatgatgcggtggttgaatatatccagaaacgccatcatcgcctcatgaccttcccggccacgggtaatgtcgtcgataaacgcggttggcagtggcgaagccacgccgtacagcccgaggaagtttgttctgactgtgggcggtgcatccggcagctccgggtcggtttcggtggtgcgcaattcgcctgccgggaaacccacccccggatgtggacggaaacgtaccgggtcgttttctggcgagcgacccgtacccagctttgtatcactcagtcgttcgacaagctggcagaaacgataaaaattaaacgctggcgtgcggtcgcgtccttcagcgtccagccagaacggagggagtccgggtttgttgtcgtccatcacatcagcaccctgtggatacaccgctccggccaggcccattcgattccggattggctcagtactaccgtcagttgtgtaaaacgggcgatgctggcgtactgggtgaaaaactgttccagcagttcgctgaataaccgggcatcccccagaccgctgaactgcgcttcatccagttccacatgaatacgcacaccgtgccactggtgcgatgcgttatatgcctggcgataactgacgccggtgatgccgtcgatacgccgccggttgttcctgccccccatccagtcgaacagtcccagggcaaagcgcaggttttcaacgttgttgatgagaaaactcagcgcacggggatgtagcagcgacatgacctcccactgataacgcggcgtggtcggcggataacagggacgggagggcaggctgcgggtgcgcccgcgcaggctcaggttcccggtggagtaatccgtgtcaaacagcgcctgttggagcgacatacgcggaaacgcgccattggtgcaggtgagattcagcagcagacgcacaccgggaagctgttcatgggttctgccgccgagcatcagcaacgtttcatgcatcccgctcacgccgcgccaggtgcgggtgtggaagaaacgctccggccactcctgctcgtattgcagcataccgcccttatggcgaaaatgatggtaaggcacatacggatattccgtttcgtcctcttcatctttctggcttaccgtgtccacgctgtagatttcggtatggccgtcgattaggcggtgcgggcgcaggcggtaatccagttgcgccggttgcgtcaccagtggctcccccgccagtcgaaacaggttaatcaccgggacgcagtgcatccggatggcctcttcagggacgggcaggttagtcggcatcagcgcacttaaggcaatatccagttcgaagtgtgaacattccggtggcagggttaacggcgtggaactgtgcagggtcataaagaaaaagcgcgatgggttgctgaaatattcaagccacgggcgtacctcgccgcacagcgccgggctgtcgctctccggccacagggcagattgtggagcatgccagcgcggggagaaatgaatatccgcaggatgttgctccgtctcaccgccgtaacgaatgcggacacgactgacatgctgactcagcgccagatacagcgccgcctgtagcggacgttcgccgttcaggtacagcgggatatcattcagggagatttgctgctcatccgtctgcgggataacgttaaaacgcaggcgcagcgcatggccgccctccgttcgcgtgtagcggctgatggtagccagagaaaacgggtgaatcaccaggtcgctgacggtgcggtacgggcagcggttgccgcgctggtactgcatggtgctgaccggcagactcagcagttccgttccggcaggcagcgtctgctcacgcagatggttttccggttgtggtggtgtcaactccaccaccgccgtggagggcagagtgcggttcactaccggcagcagatgggaaagcagcggctcggtcagttcggggatatcgtcatcaatcttacggcgtacctgcgccatcataaaggcgaatccctgaaacaactgttccaccgactcatcagttttaagtgacactgagtctatgccgagctgtctggcgacgtccggaaacttctgcgcaaattctttagccgcctctttcagataacgtatttcactgtcgtaatagcgcaaaaaatcgtggtccattatcagtccccttctttacgcagcacaaggtggcggtcattcagttccaccacggttggttcgctgacattcagggcatcacgcggaatgatgagcttccagttgttacgcaccgtatcgggccagaaaaaaatgccgtcagtgcaacaaactgcgtgtcgtcagcgagtggcatatccagatgtgtttgctgccctggcgtaaggcgtattgcctggtatggcgcgctcaggtctttgctcagcacctcaggcccctgtttgagcaggctgcggtaatcggccaggttaaacgttgtggcgttacgcagtggccagatccgcacctccaccggcgacgacatcccgtcttcatcggtgttcagcgcgttacgggcggccagtgtcagatgcagggtatccaccttccggtaaaaaatggcgtctgtcaccgccgttgccccttgtccggcgcgctgtgccagaccacagcctgccagggagaggactgtcagtaaagcgccgcagatacgccagctagcggacatcatcattacccccgtcatcctgaataaacacctgctcaggcaatttaaaacggcgcagtttcagcaaatccagcggcccgttgtagcgctgggcgcgcaggttcagcgacaggccgacgccgtcctcagcaggccagcttaagcgccagcggccgctgtcagtcttctcgcgctgcgctttctccagcagacgcaacagcgcccaggggccgtcggcctgaaaagcagtacgcaccggtccgatgttctccccctgattgcgggaataactaagcacggcctgtggctgcgcgctctgtttatccggccaggtgaatgtctgccattccgcctgctggttaaaatacttcatcatcgcgctgtctatctgcaaatccgtctccaccacattgcgcatcgggtacatctgaatatcaaattccgtatgcagttcgccctgcataaaaaacgcctgccccagttgtgtcagcagattaaccgcatccagaaacgccggactgaatttcatcccctggctgttcagtgcggaaggcacccagacatcgccctgtttatccagcaggccgcccagttgctgacgaagaaactgctccgtcacgccttgctgcggtgctataaaatgagccagcagcgccggggaggcatcattttcggaagaggcaaaggggtagcgcccggagaatgcatcctgccagggctgaacaatctgtgtgcgccaggcttcattcatcgcctgctgcgccggggccagtaccgactgccatgcctgcgcaagcggctgtacaaacgctgcatcagcgaagccgctccagtcctggccgagactggccgccagcagctcaccctggctgcgcgccaccgtcagcgggttgtcgcgccgggaaaaggcgtcctgtgccagtgccagcgtcatggcctgcggatccggtgaggtactgacctgccggagcgaaagacgcgcctgcgtcacctgaatcagataatcctgtaatgtcagcccgctgacgggcgttgcgctgtttttcgtctgaccaggttgattctcgtcagggggtaaaaccgccagcagcggcgcaaaagtttgcgtcaccacggaggccggatcggcagtttttgccgtgcgcgcatccgtactttcctgaccggaaacccgttgttttaccgattccagcagcgaagtgcccatcgtcgtctcttcctgcccgatacctgcctgccagcgcagggttttaccgagcgcgaccagcggggagcgttgtacgtcccccagcagggtaagctggtcaatggccgaagagagcgagtctgcctgacgccagcgcagactgttgaggaattccagccaggcgttgctgtagtcggtaaagtaacgttccgccagacgggtacgcagtgcctcttcacttaacaccggggaggttcgtccggtatcatcaagcacccagtcggtgtggatttgccgtccggctgccacctgatcgatggcctccctgacattctgccgccaggcttcgcgggtaaacataccgggaagtgacgcattgctgtagaacaggtcgccgctgccagcgtcccccggcaggtcgttgagggtgatatcggcatgacgctgcgcaacctgttgcagaacctgctgataaagcgtgttctcactgttctgtatccctttctgactgcgcagcagggtacgaacattcgcaatcatggtgctgtatgccgggagtcgccaggccgggtgcgcaggcagttcgcgcgcgtaaaaatccagcatatcggacgagagcatcatccattcaccgggcgttataccgcgggccgggttctgccataacggcaacaacacctttttcagaaattccggctctgcccgttccggttgcgtcagcatcagatacgccttcaactggcgataagtttctgctgtcagcgtgcggcgctgcgccgagccgggcggcagcgccatatactggcgtaaatggctgcgaagctgttccgccagtggtgcaaccagcagcgtctggttttgctgttgccagaccggccacatggccgccagcagcgcatcattctggttcagaccgaagcgataccaccagggagcaccttcgcgactgcggtataacagggtatccatgcgtgcctgacgctcctgttgctgacgcacctgctccgcgaccggtcgcgcttttttctccggcaacagcaacgccatatctgcctgaaccagacggtaattaaacagtgccgagagcagcattcccgctccccatagtcccagaaatgcaacggtgccacgcaccagccagtcgcctgcaatcaggtggtcgcgttctcccctggcgtgacgtatctgcgccacaggctctgaccaggccgcagacagtgaacaggcgtgctggcccatatgctgacccggcagggcggggggcatgaaaaacaatccgcagagtggggtttcgctcccgcgccggacgaacggttgcagggccgtggtaattctgctgccggtggcgtgctggatatcgtgcgacacctgcaacagccagttccagcgcggctgaagggacagttgcgccattccctgtccggtcagttgcgggagcagggtatgcagttgcgtctgaatattggtttcctgcgcaggggacaaggcaatacccacactctggcgcggtcggtcgtactggtcatgcacgctgtcgcgcacgcagagggtgtacagcgggggccgccagctcagcgtgcgggcaatatcccgtaactgctgccagagcgtgcgcatgactccgtcgttaaactcgtcagggctgctgttttccagccctggcagacgcgccatacccgaaggcggcgtaatgtccgtcacccacagcaccgcgttcagcacccgccgcccgcgcagacggcggaacagggcgatgtcttcctgagcaatgtttcccggctcgccgcaccacagcagagtggcggacaggctgcgctgccagcgttcactggtcagacccggcagcagggcttccacggtctgcgcctgccaggtgaccagcagccagggctgacggtgacgccggtgttcattgtgcagacgccagaatacccgttcgctttcttcctgttttttatccgctggccgggagaaagagagtagctgaaaggcaaaacccagtcgcgccagcagaaaatagcccagcagaatgcccgcctgggcaatccgcagggtggattcatccacaaaccatgcctgtgcctgcgtctggcacagcgccatcaacagtatcgccagcagcaataacatcagatgaagcgctttactcatggcgtatcccgccctgcaactgccactcatcattcagcctgcgttgccaaagaatcagggccagcggcaccgctgccagcattaacaatgcatacagtacgccgccgcccgccagccacggccacagcgtctgctgcaccgttgagtccatcagcagaaagaacagcagcagtacgcagcagacgcccgccgtccaggccagcgggtagcgtgatatgctatcctccggccactgggtcgcgggcgcgggatggacgtttaactgtacgcaggcagtttgctctggtaacggtgccaccaccatctggccgcgctgcccggtgtcggtggcctgtgccgccagtcccagcgccagccagaagctgtttttatccggctccccgatatggcgggcaagcaggtgctgtccgtcagacggcagtgtctccccctgcgcatccagtacggcaagcacggtattacgcgcgcgggtatccagcccggcatcccacaggtggcggcgctgcccctttaccatctgctccaccgccagcaggtccgtcagagcctcttccggttcagtggcgggtgcaaacagcgggcgaaataccgataccggacgaaaacccgtgttttcaggtaaacgctggcgagccgccgtgaacaacagcgccacgctgaattcactgcctgccgcatctgcgctgagcaactgtgtgcagagcagcagccgtggcgtatcggacgcttcatcgcaccactgatacagcaggcgggcatcaggcggctccgcctgccagtgaatacggttgtccggcaactggcggctcagcaacgcaagccagcactgtgccagcgcctggcggctttcgtcttccacgctgccggtatacagccagatatccaccaccggctgcggacgcagaaccgccagtagtggtgtgagcgtttgtgtcagaatgtcccgtaacggcgacatgcccagctcactttgcggcggacggggcagtaataccgccttcgctggtgcctggggcacgacgccttccagccccagtacacgcagtgcaaggtcgggttccggtgtcagaacatgccatgcagccagcgtcagcgactggcgtccccactgtcgccactgtgcctgcttactgtcgataaacagatgccgccagcggatttcccgccgctgatgcaggacatggcttagcagaaacagctccagcgccacggaggtcagcaggggaataagcagcagccagaaccagaaacggcggtcggcgaaaccccgcgccaccggccaggtgaaaaacagcaccacagccgccgccagtacacacgccagcggcagtaacaaccatacccaccaggcagggaaacccggtagcgatttacgctccatttgcggtaaacgccagtccatcagcagtccgctccggcattgggcaacgatgttctcagcacgcatccgcactgtgccgtgcagccgtcaacaatcaccgcccggccattcatcgtccaggttgggtgaccctgggttactggcacggtgccgtgttgcgggcaactcacggtatcgcccgccagcatcacaggtttgccatcgaacatggccccggatgcggtgatgacgttgccgccgtgagaatggctgtcgccgagtcgaattacgccgcgcattaattgcctccctggtgatagcggtcaacagcagcctgaggaatagtctcagatattttatccacgccgaaaacgtccgactgaaaaccggccatatacatgatgacaaacggtgttcctggctttttcccggtctggtaattttgtgactcagaagtgacctgataggttttatttttatcagaaggcatcaataaccccagccctttaataatagccgtgcattcggtatatccctgttctttaagctctttggcttctggcctgatgaccgataaaaattgcggttgatggtcttctgatttaatcattgccagataactgccatcgctttgcttctgaatatacaggtctgcacgctgctcgactttatagctcccctgaagttccgggcaggcataaacaaaaacaggcaccattaacaacagtgaacccagtatgttttttgacagtaacatcataattcatcccttctgtttgttattgtctgcgacatcaggaaaagaagtatcgagttcttcattatttattttccctgttccgatgcagtcagccctaaatccgggtcgcagcgcatatggtcccagccggtgtaatttttaacttccgggactttattggggatgccctgccagttgggtttgtgagcaaaaatactccagtggtctgggccagcaactgcgttccacgaaatgtattctcttccccagtcaagtcctgagcttccgggcattaaacgatcctgttccagttctccccgcgaattatgatatgagtaaggaataccttccccccccttttgaagacgcggatcgtcaaagggttttgagctcatataaatatcgccggatttagtttgtataaatccctgatcgtttactactgtgaaagacagaatatcatcactttcaggacccgaggctccatattgctttgcgcctccacccggcataaagtgggcatcgtgccatgttttcccataatctttagaaaccattacacctgatacatcgtaataggtgatcgcaatgtacttttcggaaggatggacgtattttttggtaaagagacggtaaaactgagacgtcacttcggtatggatattacgctgtgtatccgtataccagagcgccccttcacagttgaagcccaccaattccagataacggtgatcgtcaaaacgatataccacctgagtgggaggtgtctgtctggccgtacccgcactacaggcggtcaatgcaccggttccgacaacaagtacgtgtataagtatctttttcattgggtttcctctcctcaaacctgtggcttcggcatatcccactgtaaaacctccaccatctcgttttcggtatcacgtttactgcccggtttaacgcgttgacgagggccatagtcattcaccacgccagactcccccgtgggcattggcttttcgcctgtttcaggtttgttcattaattttttgaattcatctggcaatattccctcttgatagtatttcttgattttaggctctggattccccggtctgcgccagtccgcctgtaacagcaaactgtcccagaacgccttattctcaaacgcttcattacgaccaatggccaggtcatagggtacggctttcaccggcacatccgggttacacacaattgacgagtgttgactgtaggtggtcttgttggcagcgactttctccagctcttccttcgtcatatagcgccgtactttcagccgctgtgacgggccgtatccaccctccaccctgccgctgacagcttccatctgatgaagcgtgctcaattctgccagttgcgccgtacccagcgactggccgtcgcgcagatagcggaacgtcgccgtatccggcacctccagcacctcctgcggaaaatcctcggcttttcttgctgccttagcgattgccgggtcattgccagtgagcgacatttcgtaaccgtctttttgcccctgaagctcaaagacgaagggggcgggcagtaccgcgccgttgatggtgacatcctggtaagtgtatttcacatcttgcttggggatttccgggtcatttgctttcgcctgcggcatgacaaacgaataaccggttttatctcctaccatcacatccttgcagaacacccgctggcgtaaattctcccccatctgcgcgctgattttgtccggaatgccgcgccagcccatgccctgcaccggcagcatcgacacaacctggtcgttcgggcagaaatagttgtacaccaggccaaagttgttgcggttgtatgcttcagcactccatttgtcccgtccgctgcgcgacaggcaaagctggtcgtacagtttttcagtatcccccgcattatgggactgaccgccgttatactgagggttatccgccattactttgcagaagtgtgccagcgtctgctgacgtgccttatccgtctgctggttgcccggctgggcgttctccagccagcggttttccagcgaataaggggagttattgaggattacacaatctgcggggttaaaaccttccgccttcacccacaggttcgccagcatggtgacaatggtgccctgactgtgggcgacaatattgatggtgtcttttttagttgattcattctgccggatagccagaatcaaatccgccagccgccgcgcggcgaatgcctggtaaatgcggtgcgggttggcataaatcgggtggctccagtcgccgtcattcatcttcgagcgggacagcgccccgacaatctccagcgctgcaccgttagcgcccggcccgaacatatcggggatgttggtggtggcgttggcgaaagtgccgccccctttggcgaacgccggatcgagccagttgttcaggttatcgacattttcaccgttatgggcatgaaggacttttttatcatcctgttgatacgtatcgtaagccaggtctgtcttatcccgcttttcccgcagttcatcgcgatagcgcttctggtcggcttcccaggtggctttatccacgggtttgtatccccagtagaacgggatcgttggtgaacggttcaccaccccgatacaggtctgtttttcctgtggacaggtggtggcggagatattgccgtccgggtcgcttatcatgaattcatgtgctttccagtcgtggggatgtaaatcatcccggcccagccgttcgttcagcccctgacagataccttcgtcctggttctgataggcctctcccacatcattgacgccgtgaaccagaatcacgatacagggtaagggagactccacttcacaatcctgcaccagcatttttcctgaatctaccggacggcagatgtcccccaccgataaaaacttcgggttacgaatatcactcatgatgcttctcccttaaggagttcaacggtggctttttccagttcgttcattgtcagtagtgaagattcgccactctcgtctgtaatgccttcctgcacggaaccatcctgacggtgaatacggaatttctggtttttcagaatatgtgaaggatcgcccttgcggtgcaatcggtatttcaggccaaacgtcccttcgttaaatgacggcatcgcctggctgatgctctctccgccctggtaaatcaggtttggcgttttttgtacaatacgcgtggggccaagctgttcaagcacgccgtctttaatgcgaatgcctgcaccgccgcacatcagcagcagctcctgtttagcattcagcacaatgcgcccgttggtgctggtcagttgcatatctgcaaacgaggtcagttccatctggtctttctgcgcctggatctgaattttcccggcggcggctatcagtttgatgcccattttgtgaacgaagacggagaatatctgcccgacggcgatggaaaactggcggaagacgctgaagctggcgtcctgtccggcggtggcgagcaggtttttgccagcggaatgttgcagggactccggcgtggtctgagcaattccggcttcgccatgtaccacgatgccgggctgttgcagtgaggtcagggcagcggaaagctgctgttgcgtggcggtactgaccggagaggactgggcgatattcgccgtctgctccagcgttttcgccagcgccagtgctttctccagttgcgcgatggtcgctgccatatccagttgtttgccctgcgcctttggctgggcttcgctggtgagcagaacgccttttgcggcgcgtatcgccgcccagcccccggtgcgcagttccgcgccttcgccgcgcagtttacggttctgatccaccaggttgccgaggttaagctggctgcggtcattattgggtgtggacagcttgatatgctctttgccgcgtgtgtcatccatccgcattttgttgccggaaggcgttcttaacacattgcgtttgtggttctgctgcgcgacatggtccgggtgggtggaatcatgcattacatgggcgatatacgggcgatcgccgtcgctgttttcaaacgctatcagtactcccgtaccgtccagcagcggccagtggaagccgtaagtatctccggcataaggtttcgccagccgcacccagcagctttcaaagcctttcttccactctttcaggtcgagatcaaaacggatgcggtaacggccctgattgtcgatatacgagtaggtgtcgttttcctcttcgctcgacacgcgggctggcagcgtgccggacatcggcggccacggcagcagcggcgggcggtatgtaaagcggttgttccagggaacggcggtgaaggtgacaaaatacgctgtgtcgcgcgccacgttttcgcagcgggtggagacaatcagcagcccgtccggcgcatcggcgaaggttttaccggtgacggtgattcgcatccctggtcgcagggccatgcagttacatttcccttcgaaggtaatcagttcgctgaggtggcgctcctgacgacgcttcgcgtaccagatgccctggccgggctgctcctcatattcttttccggcgtcgggataatgttccgcccagcggtagtcggtggcccacagagctcgaaaatcctcatgggttttcacttccgacttcatgtcgctctgcgcctgaagatagttatcgtcgttagtctgcacccgtttcggcaccgcctggcggttaacggtgatatcccataccgattccagcccgccatcgaacaaacctgaaggatgacggaaggggattgccggaccttttatccagccgccggaatggtcggtaaggacaatgacgtcttcgtcattctcttcgtcgtactgacggtaaaacgacacaccgctatcggccagacggcgtgaaacgtggtcgtagtcggattccccatactgcaacataaaatcgcgtggcgggtagcgatcggtgagcttaaagacgaagcttagtttgtctatcaggtagtcaccgaaggtgtgttccgtcaggctgatgatgctgtcattgaggaacaccgcgctgttgtgcccctgcgccatgcgcgccattttgtgttcgagcaccgcgacatagcgggtttcatcggcggaggtgctgcactgacgaaactgcgtaataataccggggagaattcggggtttaagtttttcgtaaggcttgccgtcggggtacatcagtaactgtgcgctgtagttaatcagcagatttgcggggatgtcgggcgtggcgctggtgaatacgatttcgtagcggggtatctgactgatggcctcacagccgccgaatttcaacaccgatatctgaatatccggccttgcctggttcagctttttcagcagtaactgataatggttgtaagtgccgtacttaccgcccgtaataatgtagtcctggatcgccattgattatccctgccaccttgttctcgaaagaataaaatctgaagcgcaataacaggagggatattacatctcatcatatccctgaccatccgatggaatgtagttaatcgttaatgtttgatcaggatcaggatgcatgttgtttatgataaatatcaggatgtaattagctgaatgcatttatttatctgataataggtggatgcatgtttcctttgtaaattcagaaaacaaataaaataagcgattttatttatttcattaatacatcgttactgcgtaaccatatattaaaagatcgcgttaaaatacttttccctttttttaatatttattcctgtgcgctcccgctcatcctcaccgaggagcagtttttccagcatttcacgctatgttacatccagaatcgaaccggattgaccaccaaacgtatgcgatgtcaagaaataacttgagtgattaatgaacagaaatgacttgtaactgtttgattttattgaacttaaaggagtggtgcaatgtcatgaagagatgaaatggtgccgataataggagtcgaacctacgaccttcgcattacgaatgcgctgctctaccaactgagctatatcggccctgcaagatgtgctgacgagcgtaagcacgggatagaaggttaaaactaagtgggtgatgcgtcaatgcccttgcgaatcaaacggctacttttgcatcacccaattagcattaagcacgaatggtatcgtcgccgaaaccaatccacttataggtcgtcagggcttccaggcccatcgggccgcgcgcgtgcagcttctgggtgctgaccgccacttccgcaccgaggccaaactggccgccgtcggtaaagcgggtagaggcgttgacgtacaccgccgaggaatccacctcgttgataaagcggttcgcgttgcccagggtgcgcgtcaggatggcgtcagaatgctgggtgccgtgctcgcgaatatgcgctaccgcttcatcctgatcggccaccaccttcacgttcagatccagcgacagatactcattgtcatactgctccgctttcaccggctctacgctggccgggccgttttgcagcgcgggcagggaggccgcatcggcgtgcaggctgacgccgctttccgccatctgcttgctcagcgcgggcaggaagcgttcggcgatatcctgatgcaccagcagcgtttcgaccgagttacaggcgctcgggcgctgcactttggcgttaacgataaccttcagcgcttcggcaacgtcggcggagtggtcgatataaatatggcagacgccgataccgccggtgatcaccgggatcgtcgactgctcgcggcacagcttatgcaaacctgcgccgccgcgcgggatcagcatatcgatatacttatccatcttcagcatctcgccgaccagcgcgcgatccgggctctcaatcgcctgcacggtggccgccggtaagccgcactcctgcagcgcctgctgaatcactttcaccgtggcggcgttggtgcgccaggtctctttaccgccgcgcagaatcgccgcgttgccggttttcaggcacaaagaggcgacatcgacggtcacgttcggacgggcttcataaattacgcccaccacgcccagcggcacgcggcgacgctcaatgcgcaggccgctgtccagcaggccgccgtcgattacctgaccgaccgggtccgccaggctgcagacctgacgaacatcgttagcaattccgctcaggcgcgccgggttgagcgccaggcggtcaagcagcgcctcgctcaaaccgttggcgcgcgcttccgccagatcctcagcgttagcccgcaggatcgcgtcggtctgtgcttcaagatagtcggcaatcttttccagcacccggttcttttcgcggctggaaagctgcgcgagtttgtacgaggccgctttggcagcaatgcccatttgttccagcattttcagctccttaacggataatcatgtcgtcacggtggacggcgaccgggccgtattcatagcccagaatggcatcgatctgctgcgagtgctgcccggcgatgcggcgcagcgcatcgctgttatagcggctgacgccgtgggcaatatcgcggccttcaaggctgcgaatgcggatcacttcaccgcgcgagaagttgccggtgatggttttaatccctttcggcagcagggagctgccgcgttcgagaattgcctgggtcgcgccggcgtccacggtaatttcgcccgccggcggcgcgccgaaaatccagcgcttacggttttccagcggcgattcctgggcgtggaagcgggtcccgacggagatgccctccatcacgtcgccaatcacccccggacggctaccggcggcgatgatggtatcaatgcccgcgcggcaggcgacgtcggcggcctgcagcttggtgcccataccgccggtacctaaaccggacacgctatcgcccgcgacggcgcgcagagcgtcatcgatgccgtaaacgtctttaatcagctcggcctgcgggttgttgcgcgggtcggcggtgaacaggccctgctgatcggtcagcagcagcagtttatcggcgccggcgaggattgccgccagcgccgaaagattatcgttatcgccgactttaatttcagcggtcgccacggcgtcattttcattaatgaccggcacgatattgttatccagcagcgcgcgcagggtatcgcgggcgttgagaaaacgctcgcggtcttccatatcggcgcgggtcagcagcatctggccgacgtgaataccataaatagaaaacagctgttcccacagctggataagacggctctggccgaccgccgccagcagctgtttcgacgcaatggtcgcgggcagttccgggtagccgaggtgctcacgtccggcggcgatcgccccggaggtgactatcacaattcgatgacccatcgcgtgcagctgcgcgcactggcgcactaattcaacgatatgggcgcggttcaggcggcgggatccgcccgttaaaacactggtgcccagttttaccaccagcgtctggctatcactcatgattctctgccgttcaaaaaggagtttcgatatcgagttgatgttgtaacaggagtcagcccgcttgccaacacctggcgtggtggacgaaccacttcattgcgcggatcgggcattctggcggggaagtgtgacacattcatgacggaaataatttaatacccttttttagaaaaagttccatattgtcataaatttttaatattagagcgttaaaaaacctgcagtttttgacggggcttccgcccggaattgattagcgcgtataaataaatcaccaggactgaataatgaaaaagagctcactggcattaatgatgatgggtcttattgcttcttcggctacgcaggcggcagaagtttataataaaaacggcaataaactggacgtctacggcaaagtcaaagcgatgcactatatgagcgactatgacagcaaagatggcgaccagacctacgttcgtttcggcatcaaaggcgaaacgcagattaacgacgatctgaccggctacggccgctgggaatcggagttctccggcaacaaaactgaaagcgactcttcgcagaaaacgcgtctggcgttcgccggcgtgaaagtcaaaaactacggttcatttgactatggtcgtaacctcggcgcgctgtacgacgttgaagcctggaccgatatgttcccggaattcggcggcgactcttccgcgcagaccgataactttatgaccaaacgcgccagcggcctggcaacctaccgcaataccgacttcttcggcgtggtggatggcctggacctgaccctgcaatatcagggtaaaaacgaaggccgtgaagccaagaaacagaacggcgacggcttcggtaccgccttaagctacgacttcggcggcagcgacttcgccgtcagcgcggcctacaccagctccgatcgcacgaacgatcagaacctgctggcccgcggcacgggtaaaaaagcggaagcctgggcgaccggcctgaaatatgacgccaacaatatctacctggcgaccatgtactccgaaacccgcaaaatgacgccaatcagcggcggttttgccaataaagcgcagaactttgaagccgtggcgcagtaccagttcgatttcggcctgcgtccgtccctgggctacgtgctgtcaaaaggcaaggatattgagggagtggggagcgaagacctggtcaactacattgacgttggcgtgacctattacttcaacaaaaacatgaacgcctttgtggattacaaaatcaaccagctgaagagcgataataagctcgggatcaacgatgacgatatcgtcgctgtcggtatgacctaccagttctaagccgtcgccggtaaaaaacaataaagccgccgtggtgacagggcggctttattcttgctgattaacggtttttcgccagatgcagattatcgttattcatcgtgatctgcgcgttatattccttcggcaggcggcgcgcctgataaaataccgattgccagtacggattatccagcgaagagcgcatcacgccctggctggtggaggcatggaggaaattacggtcggtatcatagaagccgacgtgcatgccgcctttaatacggaagaaaaccaaatctcccggccgcagctgccgcgggctcacgcgttctcccatatgcagcagttcgcgggtggtgatgcgctccatcggcaggttgaagcgatctttgagcgtacgccagacaaacccggagcagtcgaccccgctttgctccgtcccgccccactcgtagggcgttccctcccaggtatgcatctgatcgtgcagcgcggcgatcaccgggatcagatcgtcagaacctccgtcgatggtcgcgtggctactctgggcggcggttttatgcggtttcgatgaggatgaacatcctgccaaaagcaaaaaaggaacaaataatagcgcgtgagagagtctgggcttcatatcattgtttttcgtcactgaaaacgggccgtgatattttatagccgattcgctacggcctcagaatgaccaaaagcaaaatttacgaaaccttacgtaaataatataggtcggatacgcggtgaacatcggcggtctttattttcgccgggagcgcctcattttccattaataaattttttctccgcgaaacaatatttcacaaatatccatatgtcgcgcgtctgttccgcttcagcgcaaggtgaaagatcctcatcatcccgccattgcgccgccaggctgccctccagtacttttgtagactaaaagagagagtggggcgggctaatgcatctggattttcgccaactgcgcaactttgtcgcgttagttgaatacggcagttttaatcgcgcggcggaggcggtgtgcctgtcgcagtcggcgttcagccgcagcattcaggcgctggagcagagcgtcggccatccgttattcgatcgccagagcaagctaccgacgctcaccctgcacgggcaaaagctgctgccctacgcccgccgctttcaggagctgaacgtggagctcagcagccagctgcgcgaagcggacgatgcgcaaaacggcgaggtcgcttttggctgcgggccggcccctgccgcaaggctgattccggccgccgtcggcgagtttcatcgccttttgccgcaggcgagggtgcgctttcagattgataactggctggcgctgcatcaggcgctgacctctcagctctacccttttgtggttgccgacagctggcaggccgagctcgacccgcagctgcgcgtgcagccgctcagcccgcagcgctgctttttcgtctgccatgccgatcatccgctggccaaacaggggccggtctctatccaggcgatgctgcgctacccctttgccgccccctatctgccgccgggcgtgcgcaaggtgctggcgaccctcagccagcagcaggactttaccccggcgattcagtgcgatcatatctacgcgctgcttgccaccctcgcgcagaccagcgcaattagctttgccagcgaggacggcttcgcgctatgtcagcacagccatcggctggttaagctggagctcagcgatctgcctgaggagtggcggctgatgcagacccggtttgccattatctctccggttcacgcggcccagccgccgctggtggagaagctgattgagattatccttcataccgatcgtcagcatcagcttcagctgctggcgcaggaggagaggggttaaccggcgtttttcgcctggcctttggcatcgtactgcggccagcggttttccagtccctgggctttcagcgcctgctcgacaaactggccgtctacccactggctgacgtcaaaagcgctgcggattagccgcccggatttagcctgttcgacgctattgctaaagctgtcggtcaggaacggatcgatacgcggcgaggtggtaaagttcagatcctgcggctgcagctcttcgagaaacagcgcctgcgggatctggctctgctgcgccatctcggcggaccaggcgtcgcgattggccgggtcactgatttcagcggcgttcttcaccaacacgttaacgatctgctgggtcgcctgcggccaggcgtctataaacgtctgcgtgccgaggaacccggcctgagtggtgttctggcggccggagtcaccgcttttgacgaccacatcaatcttatcgccgcgtagcgccagcagcgaaacgccgccccacaccgcatcgacgcgaccggccgccagcgccgctttgccggcgttccagtcaaggttgatcgtctgcaggctgcgctcgttgaggccgacggtttgcagcgcccggtcaaaggccagctggtccgccgtgccgcgataaaccgccacccgtttgcctttcagatcggcgagggttttaatcccggaagctttggtcaccgcgaggtaagattccgaaccccggctgcccagcagcaggcgcgtcggcagcccgttggccctaccgataatcgccgccagatcgccgaggtagacaaaatccagctggcggttggctaatgcttcatttaccgccggaccggcgcctttgaaaaactgccactgcacttccacgccctgcggcttaaacacctcttccagctgatggcggataaacgccatgccgaccggcccctcaataaagggtttactgcccgcgctctggtccggcacgccgatgcggatagtgcgtagcgtttcggcctggacgctggacgccaggctgatgaccgcgaccagcgccagcaaggtgcggttgaatattgctttcatcataacgtgttgctcccttgagttttttctcaccctaaagagccaacgggctgcgtgttaaatgcttttattcgccaagcttgggtgaaaaaaagctaaatcaaacgccgcgcgcccggcaggctgaaatgcattcgatgcatcgggattattcgccttacgcaatggcggcgaaggagaagtcacgttttgatagcggcataacttgccgaaaagtgggccgatatgtcgcagatgatcttaagaaccgatgccccaggcaggccgggcttcaggcttaacggctggccgtggctgctgcctgcgttactgctgctgctgtggtacatcgccgcccgcgaacgatggatgccggagcaaattttgcccgcgccgtcggtggttgccgataccgcgctatcgctgctgagcggggatctgctggcgcaatggggattcagccttcagcatctggcgcttggcctgctgctgggcgctatcgctggtacgctgctcggcgcgctgttcggcctggtgccggccgccgcgcagcgggtggaaccgctattctacgcgctggcgcaaatcccgacgctcggctggatcccgctgtttatggtgctgttcgggattgataacggcctcaagctggcggttatcatcaaaaccaccgtagtgccgatgaccattaacacgcagcaggcggtggccggcgtgccgcaggccctgagcgaagccgcaaaggtgatgaacttttcccgctggcagcggctgcgctggctggtgatccccgcaagcctgccgggctggtttaccggcctgcgtctggcgctatcgcaggcctgggtgtcgcttatcgtcgtcgaactgctggcctcttcagaaggcattggctacctgatggtctggggtcgccagctgtttcagctggatatcgtcttcgtcaccattgcggtcgtggggctgagcggcatgctgatggagtgggcggcgaaccgcgcctgtacccgtctggtgttctggccgcagcctgccgccggacgcctggcgtggaaaccgcaggccagctggcgggcgctgcagctgccgctggtcctgctggcgctgtggcagctggcaagctcgtggggctggatcgatggcgcgctgttctcttcgccgctggcggtggcgacgcgttttattcagggcgccctgagcggggagctgaccgcggcgatgctggcaagcctcgggcgagcctttgtcggcggcgcgctggggattgcggggggcctgctctgcggactgctgctggcgctgcgcccgcgcgccgggcaaatcttcacgcccacgctcaacgtgctgcgccatatcgccctgtttgcctggctgccgctgctgaccgcatgggtgggcaacgataacggcggcaaaatcgtttttatcgcgctggcgtcgttctttccgatgttcttcagcaccctgcaggccgtgcttcagcgtaacccgcagctcgacgaagtcgccagggtactgcgcctgggcgagttagcgcgcctgcgcagggttattcttcccggcgcggcgccggggatcttcgccggtctgcggctggcgctgatttacgcctggcttggcaatatcggcgcggaatatttcatgtcctccggcgtcggcatcggcagcctgatgatcaatgcccagcagctgctggatatgcccaccattctctgcggcatggtgctggtcggtatcaccggcgcggcgctggataaagccggacgtttactggaaatgcgcgccacccgctggcgtcaacaggagcagctatgacctcttcttcaaccctggtctcttttcgccacgtgcgtaaatcctggcaacaggtgacggcgctacagaatttcagcctggatatcgccgccggtgaactggtggcgctggtgggcagcagcggctgcggtaaatcgacgctgctgcggatgctggtaggccttgaatcagcgacccagggcgatatttgcattaacggcgagccggtcaccggcgtgggcaaagagcgcggcattgtgtttcaggagccgcgcctgtttccctggcttaacgtgctcgacaacgtgatgctcggcctggcggatgaaaagctcagccgggcggcgaagcgccagcgggcgctggaaatgctggagcgcgtgcagctcagcgaattcgtcaacgcgctgcccgcgcagctctccggcggcatggcccagcgggtggccattgcccgcggcctggtggcccgtccgcagatcctgatgctcgacgagcctttcggcgcgctggatgccctgacgcgccacaccctgcagcaggaacttttacagatccaccagcgcgcgggaaccaccacgctgctggtgacgcacgatgtggaagaagccgtcgccctggccgatcgcgtcgtcgtgctttcgccgcgtccggggcggatacgggaagtggtaaacctggcgctgccccatccgcgccagcgcgatgatgccgcgtttaccgccgcctgccgccagattcgcaacctgattacttctgcctgattctattatttaaggagcaacatatgggacatccttccgtctacccgaccggcgccaccctctacgatccgcagcgcgcctggagcggctatacccttttccaggccaccgaacacggcgcggtgctggtggacatgaacggccgcgtggtgcgcgaatggcctgaactgcacgggtttcccaataaaatcctgcccggcggcgcaatccttggccacagcggcgagcgcgacccgcgctacggcatgcaggatatgctcgatctgatccaggtggactgggaaggcaacgtcacctggaaattcgaccgctacgagcaggtgagcgatcccggcaacgccacgcgctggatggcgcgcgcgcatcatgactatcagcgggcgggcaacccggtgggctattacgcgccggggctggagccgcaggtggatggcggcaataccctgatcctcgcccacaccaatctggtgaatgaagcgatctccgacaagctgctgctggacgacaccattatcgaagtcgactggcagggtaacgtggtgtgggagtggcgctgcagcgaccattttcacgagctgggcttcgacgatgcggcgcgcaccgcgctctacaacaacccgaatatgcgcgccagcggcggcggaatgggcgactggatgcatatcaactcgatgtcggcgctggggccgaataagtggtacgacgccggcgatacgcgttttcatcccgacaacattatctgggacgcccgcgaatccaacattattgccattatcgacaaacagagcggcaagatcgtctggcagctgggcccggactacagcaaaccggagctgaagcacatcggctggatcatcggccagcaccatgcgcatatgatcccgcaggggctgccgggcgcgggtaatatcctgattttcgataacggcggctgggccggatacggcgcgccgaatccggcgtcggcggacggggtgaaaaacgcctggcgcgattattcacggatcctggagatcaacccgctgaccctcgatatcgaatggcgctactcgccctatgaagcggatctgccgcagccaaccgattcgtaccgcttttacagcccctacatcagcaatatgcagcgcctggaaaacggcaataccctgattaacgaaggatcgaacgggcgcattttcgaagtgacccgcgaccacgagatcgtctgggagtatatttcgccgttctggggcaagaccctgaacaacaatatggtctatcgcgcctaccgcattccctacggctggatcccgcagctggcgcagccgcaggagacgccgattgcggcggtcgatgtacgaaccctgcgccagcccggcgcggcggcggccggtccggcgcagagcgtggtgcgggtggcgggcgtacagccgtacagtaaaagcgccgatgcgctgtgcgtggcaaccgataacgataccctgcgccgcagtccgaagctgttccgcgtcgcggaaagcgcgttcacgccgataagcgcggcgagcgagctggagagcgaacggccggttctgctgttcgtcggcgcggaacgctgcgtgcactgccgcaagctctggcagctgctggcgcatgaaaagctcagcccgcggcttgctcagctggatacgcgctatctggatgccgaccggcatcaggatctggcgagcgacctcggcgtgcgcggcctgccgacgctgctgctgattaaaccggggcagccagcatcgcgcgcacctgcgcagctcttggtggacacgctgctcgactggctgcatcgcgcagccgggtaatccgcgactacggcgggctggcgcgtgccggttcgccgtttatctggcggataaacgccatcggcgaatagcccatcgctttgcggaacatcgcggtaaaggcggccggatactcatagcccagactgagcgcgacttcggtaaccgaacgcccctcgcgcagcgccgtcatggcgtacatcaggcatgcctgctggcgccagtcgcaaaacgccatcccggtctcccggcgaaacagacgattaaacgtgcgtacgcttttactcagtttttgcgcccactgctgcggcgtactgcggatgctcggctggcgctgaaaatcgccgcatagcgccgcgaggtggctgttctgcggaagcggcgtaaacatcggcagcggcgcggcggcgcgcagttcatggagcagcagcgcaatcaggacggcatcgcgcccgctctcgtcgtacagcagcggtagctgacaggcggccagcagcagctgatgggtcagcggagaaacctgtaagacttcgcagcgttcgctttcccgcggggcgtcccgcgcgtcaatatacaggctgtgggtgctgacgccgggcatccagacgcgatgcggtttcgtcgccgggatccagaccccgctgaacggcggcaccagccactggccgtcgtccgtttcgaccttcattaatccgtgcatggcgtacagaaactgcgcccggcggtggctatgtcgctccagaagcgtgttgggcggatagtcgctgcccagcgccagcacccggcgaggaagatggtcgacgtcattaatcgcaacgttgcgcatgaagatagccctggctgaaattcgtaatagattggctttaaagcgtaagccggccacggtgttattctatatcgttacctccttttgtggaggagtgcgaatgagcgactggctttttctgtgcggcatactttccggcgtgaccacctggctctttggcttcggcggcggtttcgtcaccgtcccgctgctctatttcctggtgaccggcgcgtggggcgcgcaaagcgtcgtcgggcaacaggcgatgcacatcgccgtcgccacctcggcgctggtcatgctttgctccgcgctgctggcgagctggcgacacgcgcgtaccggtaccctcctctggcgccgcttatgggccatgctcaccggcattgccgttggcggaacggcgggcgcgctgctggcgcttgagacgagcggggcgtggatccgctggctgttcgttatctatctgctggcaaccgttgccgattgctaccttcgcgccggatttatgaccccgccatcccaccgggtgataccgacggtgccccatgagctaacggtaggggggatcattggcctgatcgcctcttttctcggcgtgggtggaagcgtgatgaccgtccctctgatgcgccgtcgcggcgtgctgatggctgaagctgcagggatggccaacgtattgacgttgccgctggcggcaacggcgacgctaacctggctgttgatggcctggctgtcgccggtggcgttaccgaatgggtttgtcggcaatatctggctgtcggcggcggcgcagctggtggcgggaagctggctggggttaaaaatcgcctcccgctggctggcgcgtttaccggaccgctggcatgtgcgaatttatccgctattgctgattgccgtactgctggtgatgagcgtgtggggataatgagggacgcggcgctgcgcatccatccgagcgttttgcccgggtcattctgctgtcatttttcttgcgcatgctctcgcgagacgccgtggccgataaaggaaaataaacgatgggtaaaacgctgaccattttcgatctggataatacgttaattaagggcgacagcagtacgctgtggagccgctttatggtgcgcgaaggctgggtaaacgatcccgattacctggcgcgggaagcgatgctgatggacgactatgaccgcggcgaaatgaatatcgccgattatgtggctctgattcaggcgccgctgattggcgtcgcaaagcgggacgtggacgcgctgctggcgcgctgcgtgcgcgatgaaattatgccgcgcgtgtatccccaggcgtgggatctgattcggactttacaggctaaaggcgagcagatgctggtgatctcggcctcggtcagcctgctggtgcaggcggtggcggcgcagctgggtatcgaacaggcgctggggattgacgttgagatggccgacggcggctatagcggcgtgattgccggtacgccgagctatcagcaggggaaggtggtgcgcctggcgcagtggcaacaggcgcatcctgaatactcgggggaggtgaccttctacaccgactcgatcaacgacctgccgctgtgcctgcatgccgatcgcgtacggctggtcaatccgtgcccgcagctggcggcggcgaacgcgcagcaccagtggccggtgctggcgtggcggctgtgatttttcccccgggtcgcggcgtaaacgccttacccgggctactttttcgtgccgtttgggtagcccggacaggtgcgcagcaccgcctccgggaaaaactaatcagctttaaacagcggcaccacgctgccgccgatatagcggcggcgcagccaggcggacagcgtatccatcgccatcaccaccgccaccagcagcagggtaataaacatcactacgtcccagttccacagacgcatattttccgcataaatcaggccaatgcctcccgcgccgacaaagccgagcaccgcggcggaacgggtattcgattcaatctgatacaggctcagcgccaggaacgtcgggaaagactgggtaaaaatgctgaaacggtgcttctgcaaaccgttcgcccccaccgccgtcaggccgcgtcccggcgagcggtcaaccgcctcgtgtccctctgcgtacagtcggcccagcagcccggtatcctgcataattatcgccagcaccccggccagcggcccgagccccacggcgcggacaaaaatcagcccccagatagccatatcgataccgcgcagcacgtcgaacaaccggcgcatcagcagggcgatcgttcccggaatcacgccgcgcataatattccgcgccgccagaaacgagagcagcagggcgatgaccgtcgcggtaagcgtcccggcgaaaacaatcgccagggtaatggcgatttgcgtgaagtaatagcgaaacggccagttgaaaaagtcgtgccagacgaacatccgtagcagatagcggctgatttgctgcagccccgtggcgagctgctcgccgctgatgccgaactgcataaagaaccagacatagtagagggcgctggccagcgtcagcaggccgacgtagcgcagatagcgcccctgggcctggtataaatgccgatgctggcgacggctggcggcgatatccggttgattttgccactgactcattttttcccctccagaacccactgccgcaggcggccggatagcatatccagcagcgataccacgataataatcaacagcagcgtgatgctgacctgatcgtaccggtccagtttgatattggtcatcagctcctggccgatgccgcccgcgcccaccagcccgaggatcgttgaggagcggaagttaatttcgaggcgcataaagccgtaggagagaaagatgggtttcacctgcggccacagggcaaagcggatacgctgcagatgcgacgcgccgcaggcggccaggccgcgtaccggtttatcctgggcgctctctaccgcttcatagtacagcttggtcaggctaccgatggtgtggagcattaatgccagaaagccggggatcgccccgataccaaaagccatcacgaagatcaccgcccacgccagctccggcatggtgcgcagaaaagccaccagcacgcggacggcaaaacgcagtggggcaggggaccaggcgttgttggccgcaacgaacgccagcagggtggcaatcgccaccgccaccagcgtggacgccagcgccagctgcagcgtttcccagataagcggcagctgaatgggcagacgatagccccagtaagccagagagcctttagtgtgcgaatcggcaaacaggtcggcgacgtgcagcgtcggcagcgtctcaaacatgtaatcgagaaaattgggcagcgagtaccagatagtaaagagattaaactcggccatactgccggcggcaaaatagagcgccagcagcagcagggaccagctaaaggtgtcgcgcttttgccgcgagcggacctgctggtaatagcgttcgaattcggtatgggtattattcatgcgtcgctgtgtcttcaacgagtcgccgccgcccgcgagactggccgggcgacggcgtcagggcgggattaacgcgcggtaaccagttcgcgtttcatatcaatgatctgctggaaatcggctacgctgcccgggccgatatgctgcgtgccgcccatcgctttgataaagcaggcgtgatcgtcggtatccagctttttaatcgcggtgacgactttagccttaaagtcggcaggcagggaattgctgaccaggattgggccgttcgggatcagcggcgattgccaaataatgcggatttgcttcatcaaatccgggtgatccatgcgaatcagtcggttgaaggcgccgacgctgtagccgctattataatcacccaccatcgaggtccaggtcaccgcgccggcaaactgaccgttcagcacgcccagaatatcctgctcgtggccgccggagaaggtcacgctggagaagaagttattatatttattatccgaggtgccgccgaactgctgtttaaaggcgtggttgggaattaaaaagccggaagtggagtccggatcggcgaagccaaacgctttgcctttcagatcttctaactttttatacggactgtcggctttgacaatcaccaccgagtgatagccgcgggactgatctttatcatctacggcaatcccgacaatatcgacggctttagggttgttaatataaacggaagcgtatgatgacggcgacatacttaagaccacgtcaacttttccgcccagcaatccctgaatcacgccggaatagtcggaagagttacgtaattttgtatcgaccttcagctccttatcaaggaactgtttaacgcactggttatcaccaatttgttgggttgcgttctgaccgccaaggatgcccagatttaattccttcggctgttcagcagcgcttgcctgccacgccatcataatgcctgcaaccgctgcggataaacgaactgcgccagtgatgtactttttcattattttgcccgtgtgagtgaaatttaatgcaattggctaatttcatcgccgtacagccgatgcagaatatcctgattcagctgcgtgggatgatcgtcaaaaataatcttgcccttggctacgccgatgacccgcgtgcaatattcacgcaccagctccaccgaatgcaggtttaccatcacgctgataccctgttcgctaatttcgcgcaggacattcataatccgctgcgtatttttcgggtcgagggaagcgaccggttcatcggccagcaaaatacccgggttttgcatcagcgcccggcaaatcgccacgcgctgcatctggccgccggagaggttttccgcccgctgtagcgcatgcggcagcatattcatccattccagcagggagatggcgcgggcgcggtccgcgtcggggaaaactttgaataatgatttcagggtggaggtctggctcaggcgacccagcagcacgttggtcaaaacgtcgagacgcgggaccaggcagaaatcctgaaagatcatgccgcactggctgcgccaggcgtttagcgcgcggcccgacagctttgatacgtcctgcggcgtacccacttccggatagctgaggatctcgccgccgctggcgctgtgggtaccgttcagtacgtgcagaagcgttgactttccggcgccggagcggccaatgacgccaaccagctcgcccgcatgaagatcgaaactgatgccgtccagtacggtttgctgcgcgctgtaggatttgctcaggttgcgtacgctcaggaccttacgctgccggtcgataaagggcggcgtaaacggttgataatcggtttctgccaccgcagccagggaactgttcataaatgcgtccaggttcgtcagtaaactgggcactattaatggtgttttatatgactgccggatgacagtaaggcgaacaaatagtgaacggatgcgaaagctggcctatttgttggaaaaaaaattcatcatggatcacacttttgcattagcaatcgggcatctgagaatactctgcctacctttaatacgcgatagcgcatgagattaataatgatacgtatttcatctgataaagatgacgcgttttatgcgacattagccgggtaatgctatcgccgcgggtacaacgggacgactctggacgttcgtgcaattcttatatctgagtcggtttaaccgagtagataatcttcaggtactggattacgattcgcggcggaaaatttttagtcggcgactatcccttttgtgcggcgtgtaattccattatttacgctaattaatgaaattaaccactgattttgtgttgtttattggttttatattcttattttttgaatttgttcggttttttcgcttttttaaataaaagtgcgattaagaatagtcttaacaactaatggctaagatcctggaacatataatattcacttaagaatctacgcatatcccaccaataaccgtatgaaaaccaatggtttttgtgtttaactcaatatccttatttttattcttctgacttaaattgacctggtcggtaattagccctttgcgcacttattgacacacatggagaaaaatcctaaatttggtaacacaagaaacaagcaagtcatttagtgctctttatctctagcaatactattttgaattttgattgaatatattaaagagggaatttgctgacttagactttgcaggcctgggctatcagcagtgttgcgatacgttcaagatttccaggactatggggtttaactttatatggattataaatattctttggaccagtgcatctggccagcgcatgacagctattttttaaaaggactcgctgagctaattattgatattgatgacctgatttacctgtcgcttgaaaaggtacgccgggagtttgtatttattaatcttagcgccagttcgctgaactattttatccgccgcgatagcgagtggctggctgaaatgaaaggcaagcaaattgtattaattgccgcgaggcgctcggaagcgctggccaactactggtattacaatggtgctattcgtggcgtggtctatgtggacttagccaaggatattcgtcaggagctggcatacgttatcaacggccgttttctacgtaaagatataaagaaagacaaaattaccaacagggaaatgcaaataattcggatgacggcacagggaatgcacccgaaatctattgccaagattgaaaattgtagtgtgaaaacggtttatacccatcgacgaaatgccgaggccaaactgtattcaaagatatataagttagcgctgtaattagtaataaacgttgtttttaaaattgtgcaccgggtcgtaacacccaaaataatttgcgtcgcagataataatgatgcggcctgaactatggcgggaatgcacacagacgtgggacatcaggtcccttaataaactcaggatgaaaaagctatgaaaaaaaaggttcttgcaattgctctggtaaccgcgtttgccggtatgggtgtcgctcaggcagctgacgttactgctcaggcagtcgctacctggtccgcaaccgccaaaaaagacactaccagcaagctggtggtgactccgctgggcagcctggctttccagtatgccgaagggattaaaggctttaactcacagaaaggcctgtttgatgtggctatcgaaggcgatgccaccgcgaccgcattcaaactgacctctcgtctgatcaccaacaccctgactcagctggatacctctggttccaccctgagcgtgggcgttgactacaacggcgctgcggtcgaaaaaacggctgacaccaccatgatcgacaccgcggcgggcatcctgggcggcaacctcagcgcgctgtctaacggctataacgtcgccggtcgcaccaccgctcaggacggcttcacgttctccatcatcagcggcaccaccgatggcaccactgccgttactgactacagcgctctgccggaaggtatctggagcggcgacgtcagcgtacagttcgacgcgacctggaccagctgatcctctcgtagcaccaggcaggggggctccccctgccttatttcacggattgaattcatatgaaaaaacacattctggccatcggcctgttgctcagcacaatgacgccagccctggcgctggatgtgggcgatatctcttcatttatgaacagcggcagcagcacgctgagcaaagagatcaagaacacgaccgacagcggtcgcttaattaacatccatatggaacgcctctcttcgccgctggacggtggcaaggtgatcccgatggataagcaggacgagattttactgacccccgccagtctgctgctgcccgcgaaggccagcgacgtgatccgctttttctacaaaggcccggcggacgataaagaacgctattaccgcattgtctggttcgatcaggcgctcagcgatgcccagcgcaatggctcgacccgcagcgcggtagcgacggcctcggcgcggatcggcaccatcctggtggtcgcgccaagaaaagccaatttccgctatcagtacgccaacggcacgctggtcaataccggtaacgcgacgttgcgcattcttgcctacggcccgtgtctgaagccggctgacggtaaagagtgcaaggaaaattatttcctgatgccgggaaaagaacggcgcttcacgcgcgtgaatgtggcggataaaaaaggacgggtcgcgctctggcagggcgagcagtttgttcccgtgaaatagacatttcttctgacggatcaacattatggctctaccagggaacgctccaggattaaaaacactccttgcctccggcatggtcattttgctggttccgtttagcgtcactgccgccaccgacaaagtacagcaaatcggcggcgtgattatccctcaggccttcagccaggcgctgcaggacggaatgagcatcccactgtttattcatcttgaaggcagcaccggtacccaggacgatcagcggatcggcaatgcctttatctggctggataatggcgttctgcgcgttcggcaaattcagctggaagaaaacgataataacgccaccgtcagcgagcagacccgcaaacagctgaccgcgctggccaatgaagctttcagcaaagatcttaacattagcctgacggatgacgcccggctacagctcagcctgcgccagctgctcctgcagctggtggtaaaaaaagaggcgctgggtacggtgctgcgctcgcgcagcgaagatatcggtcagtccagcgtcaacacccttagcagcaccctgaactataacctcggggtctataacaaccagatgcgcaacggcggcaataacacctccagctatctgtcgctgaacaacgtcaccgcgctgcgcgagcaccacgtggtgctggacggctcgctttacggtattggctccggcaatcaggacagcgacgtctataaagcgatgtatgaacgcgactttgccggtcaccgctttgcgggcgggatgctggatacctggaatttacagtcccttggcccgatgaccgccgtttcggcagggaagatctacggcgcttcctggggcaaccaggccagttcgacggtgttcgataacacccagtcggccaccccggtggtcgcctttttacccgccgccggggaagtccatctgacccgcgacggacgcctgatgagcgtgcagaactttgccatgggtaaccatgaagtcgacacccgcggcctgccgtacgggatttatgatgtcgatgttgaagtgattgtgaacggccgggtggtcagcaaacgcacccagcgggtcaataaattgttcagccgcggacgcggcgccggcgcgccgctggcctggcaattctggggcggcagcttccatatggatcgctggtccgaaagcggtaaaaaaacgcttccggcaaaagatagctggctggcgggggcctcggcctccgggtcgttcagtaccttaagctgggcggccaccggctacggctatgataacaacgccgtcgccgagacgcgcctgaccctgccgatcaccgagtccattaacgtgaacctgcagaatatgctggccagcgacagctcctggagcagcatcggcagcatcagcgccactctgcccggcggctttagttcggtgtgggtcaaccaggaaaaaacgcagattggcgaccggatacggcgcagtaatgccgacaaccgggccatcggcggcacgctgaacctcaattcactctggtcaaagctgggtaccttcagcgtcagctataacgacgaccgccgctataacagccattactacacggcggattactaccagacgctttacaccggctcatggggatcgctgggcctgcgcgcgggcgtacagcgctttaataacggcgacagcagcgccagcaccgggaaatatattgcgctcgatttctcgctgccgctcggcaactggttcagcgccgggatgacgcaccagaacggttacaccatggccaacctgtcggcgcgtaaacagtttgatgaaggcagtattcgcaccatcggcgcgaacgtttcgcgcgccatttccggcgataccggcgatgacaaaaccctcagcggcggcgcgtatgctcagtttgatacccgctactccaccggtacgctgaatgtgaacagcggcgttgatggctatgtgaacaccaacctgaccgccaacggcagcgtgggctggcaggggaaaaatatcgccgccagcggccgcaccgacggcaacgccggggtgattttcaaaaccggccttgaggatgacggcaagctcagcgccaaggttaacggccgcattgtgcagctctccggcaaccgtaattacctgccgctgtcgccgtacagccgttatgaagtggagctgcagaacagtaaaaactcgctcgatagctacgatatcgtgaccgggcgtaagagccagttgaccctttatccgggcaacgtggcggtgattgagccggaagtgaagcagatggtgacggtctccgggcgtatccgcgcggaagacggcacgctgctggctaacgcgcggattaataaccatatcggtcgtacccgcaccgatgagaacggtgagtttgtgatggacgtggataaaaaatatcccaccatcgatttcagttacggtaaaaaccagagctgcgaagtggcgctggagctgagccaggcgcgcggcgcggtgtgggtgggcgatgtggtctgtagcggcctctccacttatgcccgcacgcagcagacaggagaaggtaatgaaagctaaatggctggcatgtttagtgatgttcacggcggcgctgtgcgtgacgcgggtcaacgccgcggtcaccaaaaccacctggccggatgcggcggccatgcagtttgttttcgtggaaaacaactcggacgataacttctttgttaccccgggcggcgcgctggacccgcgaatgaccggggctaaccgctggaccgggctgaaatataacggctcgggcaccatttatcagcagagcctgggctatatcgacaatggctataacaccggcctgattgccaactggaagtttgatatgtggctggataactcccccacatctcatccgttacaggggctgcgctgtatcaactggtatgcgggttgcgacatggccaccagcctgattctgccgcaaaccagcgatgccagcggtttctacggcgcgacggtgacctccggcggacaaaagtggatgcacggcatgatgtccgacgctttctaccagtatctgcagcagatgtcggtgggcagcagtttctcgatgaccatcaactcctgtcagacttcggtgaactatgacgcaaccagcggcgcgcgctgtaaagatcaggcttcaggaagctggtacgtgcgtaaagtcacccatactaaagcggcaaacctgaagctgattaacacccatgcgctggcggaagtctttatcaacagcgacggggtcccgacgctgggcgaggggaacgccgactgccgcacccagactatcggctcccgttccggtctgagctgcaaaatggtgaactacaatttgcagcacaatggcctgagtaatacctcaattcatatttttccggcaatcagcaactcggcgctggcttccgcggtcggaagttatgatatgcagttcagcctggatgggaattcatggaagccggtgagcggcatctcccagtactatacgtttaatgagatgaaatcatctgactcggtttacgtatttttctcgagcaacttttttaagcagatggtcacgctgggcatcagcgacgtgaacaccaaagacctgtttaatttccgtttctataacaccacctcgccggagtcaggctggtacgagttttcgacctccaacaccctgattattaaaccgcgcgacttcagcatcagcattatttccgatgagtacatttcggcgccgacgcgcgaaggctacgtgggcagcggcgagccgtcgctggactttggctatattgtcaccaccagcggcaaaaccgccgccgatgaagtgctcattaaagtgaccgggccaacgcaggcgatcggcggacgttcatactgtatttttagttcaccagacggcacgtcgagagtaccgttcccggcgacgctggcgtttacgacgcagaccgggaccatcaaaacctacgatgccggatgcgatgatacctggcgcgatatgaccgacgccctgtggttaaccacgccgtggacggatatctccggcgaggtcggtcagatggacaaaacgacggtaacgttttccattccgatggataacccgatatcgctgcgcacggtggaagataacggctggtttggtgaagtgagtgcttcaggagaaattcatgttcaggcgacgtggcgtaacattaactaatttgctgcggatgcttatctgcctgctgtcgctaggattggcgaccgcggcgcaggccatctcggtgggtaatttaactttctcgctggcggcggaagataacttcgcgtctaaacgggtgattaataacaataaaagcgcccggttgtatcgggtttctattgtcgctatcgaccgccccggcggcaaagaggtgcgttctcgcccggcggacggcgagctgctgtttgccccgcgtcagcttaccctgcaggcgggggagagcgagtattttaagttttactaccacggcccgaaagatgaccgtgagcgctattaccgggtctcctttcgtgaaatacccacccgcaattacgtgatgcgcaataaaagcggtaccgaggtgagtatggatccggtggtggtgatggacacgattctggttgtgcgcccgcgcgaggtacggttcaagtgggcctacgatcgggcggcgggcaccgtcagcaataccgggaatacctggtttaagctgctgatcaagcccgggtgcgatacgacggaagaggaaggggatgcatggtatttacggcccggggacgttgttcgccaggcctcgctgcgccaaccggggaaccactacatcatctataacgataaatttataaaaatgaccaaagactgcccggtgaactaaccgggcagcttttttcgcgcttcgtcgctaaaccgtacgcccggcatagcggcggttcgccagcaggctcaggccgcagcacagcagataataaaccgcgccggtaaagacaaatatcgccagcgggtaaatttgcacccggttattgacctgcccggcgacggtggtcagttccggcacgttgacgataaacgccagcgacgtgtctttgagcagcccgataaatatccctaccagcgagggctgaacgttgcgcagagcctgcggcagcagaataaggcgcagcgtctgtccgggggcaaaaccctggatcagcgccgcttcgtactgcccgcggggcagcgattgcaggcccgccagcaccgagtgcatcaccgacgcggcggtaaaccacgccagcgccaccgtgacggtgaccgcgcccggcaggtcgctgccggtgagcatggggagcagataccacagccagaaaatgacgaagatcagcgggatgccgcgaataatctccgcccacaggaagagcagccgccgcacgatcccgtcgtagcgccaggcgatggccgccagcagcacgccccccggcagcgccagcgcggcggcaccgatagccatcagcagcgtcagcaccacgccgccgggaataccgtccgccagccgtccccacagcagataatcgaggttatcaacgataaccgccaggttagcgttcatagccggctctcctttgctgatctcttcccggaccgagacgcgtcagcgccacgcccatgagcaccccaagcgccagatacagcgcggtgccgacggcaaacgcctccagcgcatgcgcgttgtagctctcgatttgccgcacctgataggtcagttcggcgaagccgataccgctcgccagcgaggagagcttcatcaggttcagatactggccgataatcggctgccaggcgttagccagcccctgcggcagcagaatgtggcgcagctcctgccacggcgtaaacccctgcgacagcgccgcttcccgctggccgtggctaacggcgcgcagcccggaggcgatctcttcgatcagaaacgccgaagtaaagaccccgagtccccacattgagcagagaaactccggcgtcagccaccagacgttgcccggcagaatcgaccagctgtggtcgtcgttgataaaatctcgcgctcccagcggcagcagattccaggcggcaaaataccagaacagcagctggaccagcagcggcgtattgcggaacagtgaaacccaggccgccaccagccagcggccgggcctgccgcccccgagacgcagcgccagcagcaggacggccagcacggtcgccagaatcatccccgcgacgctgacccagacggtggtgagaaaaccggagatgatccactgcagcggctgcccgctcagcacgccatgccagtcgagatgtgggatcacgcctcactctcctggtgcagcggatcgagcaccttctgcaggaaacggcgggtgcgggcgtgctgcggccgggcgaaaaactcggccggcggcgcgacttcgagaatatcgccgccgtcgataaacaccacccgatcggcaatctcgcgggcgaactgcatctcgtgggtcaccaccaccatggtgatcccgctgtgggcgagggttttcatgacctgcagcacttcgccgatcatctccgggtccagcgccgacgtgggttcatcgaacagaatgatctgcggcgaggaggcgagggcgcgggcgatcgccacccgctgctgctgaccgcccgagagctgggcaggcatctgccgggctttatccgccaggccaacctggctgagcagcgccagcgagcgctcgcgggcggcgcttttgctccagccgtgaacgcgttccagcgcgagggtaatattctcctgcgccgtcaggtgggcgtagagattaaactgctgaaaaacgaagccgacccggctgcgcagctggcgcagggcgctgccggtaagctggcgcgtcggtttgccgtcgatcagaatctcgccgccgctaagggattccagctgattgatcaggcggatcagggttgatttgcccgatcccgaagggccgaggatcgccactacttcgccgggttcaacctgtaaatttacgccgttcagcacccgatggtcgccgtagcttttggcgacatcgcgaaactcaatgctggcgcgctgcagatgcgaaaaatccgcggacgatgccgcggagcgtgaaaatagagccgataacatcatctttctctgcttatttcgcttcgatagtaaaggcgcgcggctgcggggttttggtgctcgggccaaaccagacgtcgtaaattttggccgcttcaccggttttttccagcttgaccagctcgtcattgaccgctttcagcagggccggttcgcctttcttcacgccgacgccaatctcttctttgctcagcaggtcggggatgattttgaagtttgccttgtccggcgcttccgccagcagtccggcgaggatggtgctgtcctgagtgatggcctgcacgttgccgttgcgcagggcggtcagcgccagcggaatatcgtcataagagagcacgcgcgactgcgggaaacgctgatgcagcgcctgttcgccggtggtgccttttaccgcgccgatgcgcgctttgctgtaatcatcgagcttatccggcgattttgccgggacgaggaactgctggccggtcacgaagtaaggcgttgagaaatcaatcacctgggcgcgttccggggtgatggtgatatcggcgacgatcaggtcggccttaccggattgcagcagcggaatgcggttggccgggttggtggcgaccagctccagcttgacgccgagcgactttgccagcgcttcggcgaagtccacgtcgtagccgacgattttatgcgttttcgggtctaccgagccgaacggcgggttggcgtcgaaggtggcgactttgaccacgccggcggctttgatatcggctagttgatcggcctgagcctgcgcggcgagcaccagcatgcccagcgccagcgcgatttttgtttttgcaatgcgcattgttattcccctgaatccctgttttgttttgtgtttatcacgctcccacaaatcgcccgtcggcggcaaagaagaaaaagttcttatctataacgaaaaagaacttaacaaagttgtggatattgtttaaccggcactgtgctaccaaactggggagacattccgtcagctattggtatctttctgaaatcacaagactcgcagcgatgccctggtgcccgctgaaatcggcgaaccggaggtcggaagacaagggctggccgccagggatggcggccagaggcgaatcgagacagcgatgtcgagttgagccgaccgcaggctgaggaccgggaggtgagcgcagtgcgcagcaccgatttctttgcgggaccgcggggattgtaaagggggagacggttttctccccctttacccgttcacgggtagcggtgaggcattttctgcagattgcgagtaaacggaacccttacgcatagaattacaaatcaggcttcggcaaacgctgcgggtccttcccagcctgcgctgcgcttggctgggctacggggcctcagtcgtctggggtcgtgtagcccggataagacgtttacgtcgcaatccgggaaaggcccctaatatgcgcccgacagaattacaaatccggaattgatatttcccgcccgccgtcaactgtggttgaaatagacacaggcaaaaatgcttcccgacggaggagaaaaatgaaagtggcgctgtggcaacgcataacgggctggctggcttctttatctggatccggcggtgaagccggtcagcaggatacccaacgcatcatggaggcaatattaccggtcgccagtctctacggaattgagctcggcaacgttgaaacaaggtggtttcgccatgataaaacatactgagcggcgcaggacgcgtgaagcctactggaacgaggtgtgctttgtgtagcgcgaggctgtttgcggttgcggcgacgcaggaagcgaagccgcagccctgaacagctttatccccccagatacatccgtttgatttccggattcgccagcacctccggcgccggaccagagagcataatcttcccattctccagcacataggcgcgatcggcgatggtcaacgccgccgtggcgttctgctctaccagcagcacggtaatattctcttcccgcagctgcttaatcgtcgcaaacagctccccgacaattttcggcgccaggccgaggcttggctcatcgagcatcagcagtaccggctcgctcatcaacgctctggcgatcgccagcatctgctgctcgccgccgctcatggttcccgccatctggctgtgccgctctttcagccggggaaacaggctgtacatgcgatcgcgcaggcgggtaaagccggcgagattgttgtaggcccccatgcgcagattttcttcgatggtcaggttggtaaagatgcgccgtccttctggcaccagcgccagccccttacgcacaatctgatgcgtctggctgcgggaaatatcctcgttgagaaaattgacccgccccgtggaacgcaccagattgacgatcccgttgagggtggaggttttccccgcaccgttgctgccgataagggtcacaatctcccggtcgtgaatatcaatatccacccctttcagcccctgaatcacgccgtaaaacacttttaactcgcgcgcgctaagcataacgaacgtcccccaggtaggcggaaatcacgtccggatcctgtatggcttcggacatcaggccgctaaacagcggtttgccgtactccagcaccatcacccgctcgcacagcttgttgacgaacggcatatcgtgctcgatcagcagtacgctgagctgatagtcgttacgcatgcggaagatcagatccgccagatcctccgtctctttcgggttcatcccggcggcgggctcgtcgagcagcagtaattttggcgacgtcgccagcgcgcgggcgatctccaccttgcgctggttgccgtagctgaggttggtggcctgcacgtcggcgaaatgggcgataccgatatcgtccagaatcgccatcgctttggcctttgccgcccgctcggcggggaagtagcggccaatatgcagcgccgcttccagcagcgaatagcggctggcgctgtcgaggccgaccatcacgttttctaataccgtcatcgagttgaacaggcggatattctgaaaggtgcgggcaatcccggcgttgaccacccggttcggcttcagccccttcagcgactttcccgccagggtcacgctgccgctggtcggcttatagttggcggtgatgacgttgaacatcgtggttttgcccgcgccgttggggccaatcaggccaaaaatttccgcttcgtcgacgtggaaactgacgctgtcgatggcccgcaggccgccgaactgcatggtcacgtcctgcacctgtaaaatgaccttattttgcgccatagccgcggccccttttgcccacttgccaaatctcttttttgcccagcagaccttcgcgggcgaacagcatgatgatcagcagcagcagcgagaacaccaccatccgcaggcccggatacgcgccgagatcgtgaccgaagaactggagcggctggtcgagaaagcgcagccactcgccgctgccgaccaccagtacggtgccgagcagcgcgccggtggtgctgcccaggccgccgagcacgataataatcagcagctggaaggtgagcataaagtcgaacaggcccggcgagatggtggtcagcagcgaggccagcagtccgccgccgatcccttcaaagaaggcgctggtggcgaaggcgcaggttttaatgcgaaacgtgttcacgcccatggcgatagcggcgtcttcgtcgtcgcgcaccgctttcatcattcgcccgtacttcgaccacaccagctgcaaaatcatcccggtcgccagcagggcgaacagcccgcaccagaacaggagatgcggctgctgcggaatatcgttgaggccaatcgcgccgttggtgatctgcggattgttgatagcgaggattttaatgataaagccgaagccgagggtcacaatcgccaggtagtcgccgcgcacgcggaagaccggcagggcaaggcaaaccgccagcgccgccgcgcacaggccgctaatgagcagcgcgggcaggaacccggcgtgcagcacgaggatccacgggctgggggcggccatctcaaacatatccagcttgctgtcactggggaggatcagcagggcggtgacgtaagcgccgaccgccacaaagccgttgggctccagcgacagctggccggtcacgccgttgatcaggttgtagctgaccgcgaggatcataaagacgaaaatggtgctgatgacgcgagtaatgtagtcgttgaagacgacgttgatcccggccagcagcgcgacgcagagagcaataatgaccaggttgcgcagctgcgccccggcggtagtcgtagcgttgagcatcagaaacggctcctttccagacgttcatcgcccataatgccaaccgggcggaacaagaggaccagaatcaagaacataaaggcaaaggcgtctttgtaaccgcccagttcgggaaacagagcgaccgccaccacctcggtaaagccgagaataaagccgccgagcaccgcgccggtgacgctgccgattccgccgagcaccgcggcggcgaaggccttcaggccgatcagcacgcccatcagcgggtcgatggtcgggtagctgatggagtagaacaccccgcccagcgccgcgaggctgctgccgagggcgaacaccagcgagataatgcggttggcgtcgatgcccatcaggcgcacggtattaacgtcgaaggccaccgcgcggatcgccatcccgtagcgggtgcggtacagcagccagaggatcgccagcagcagcaggacggtgatcagcggcacgatccacgccacgttggtgataatcacgtcaccaaaggcgcgggtgttgttgaaaaattccggtgcggaaaagaagcgcgagctgccgccaaacagcacgttgaacaggttttcgaggaagaagctgacgccgatggcggtgatcagcatggagatttttgatgcctgacgcagcgggcgataggccacccggtcgatcagcataccgaacaggccgcacagcgcgagggtcaggaaaacggctaccccgaagggtagcccaatggaagaaaacaaaaacagggtggtaaacgccccgaccatcattacgtccgcatgggcgaagttgatcaggcgcagcaccccataaaccatcgtataaccgatggcaatcagggcgtacatgcccccaaggctcattccattgaccacttgctggagaaaaatggcaccatccatctgatatcccttataaaaccttaaggattaaccacggtacgaaacgccagcttgccatccttcacttcgttgatgaccgcgctgcggatagcgtcgccgttttgtaacgtcagcgtgccggttacgccctggaagtccttagtggcgcgaattttttcgttaacgcaaacccggtcgtgcgggtcgctgcactggttcatggcgttgataatgacgttataggcgtccgccgccatcgcgccccaggtgtgggtcggctgctggtatttggcttcccaggctttgataaacacctcgcccgccggcgtttgctctttggcgttcggcgagtagtagtcggtggtcatatagccgttgaccgcgtctttgccgacgtcaaaaaagacctgatccgccgccagcccgtcgccgccgaccaccggcttgctcagccccagctgcttcgcctgtacggcgatcagcgccccttcggtgtagtagatcggcatatagatcatgtcgacgttcttcgccttcacgctggccagctgggccttaaagtctttgctgccgccgggagcctgaacttcgataggaatggcgccgccgtttttcaggaactgcgtgcgaaaggccttcgccaggccgacggagtagtcgttgctgctgtcgaagacgatggcggcggttttggctttcagatcgcgcgaggcgaggttagcgccgaccacgccctggaagctgtcggagaagcagacccggctgacgtaagggtggttgcgggtaacgcggtcgttggtcgcggttgaggagaccagcggcgttttgctgtcgtcggcgattttggtcatcgccagggtattggaggaggtgacttcgccgatcaccgcatcgactttatcgctggaaaccaggcgctgcatggcgttagcggcttcgaccttatcgctcttatcgtcgatcacgataagcttcacggtgtcgccgttttttaacgtcggcgtaatgctctggataatatccagccctttttgcgaaggctgaccgtagccgctcagcgcgccgctcagcggcaagaccacgccgattttaatttcagccgcctgcgcgctgctggcaccgacccacgcggcaaccagcgtggccattaaagacgctttcccggaaaacttgttcattgttacctcaccgtcggtggattatttatacccttcatacttcaagttgcttgtgcgttggctttcctcgctcaccccagtcacttacttcagtaagctcctggggattcactgcgtcgccgcgtgattcgcccctacgggactcaccctttcagggccagcgcaagcgctgttcaaaacggttaaccgttttgtcccgcaactcgaattattttgggtatatctttaactatcaatgactgcataacattgagacataattcgccagcgtatccggcgaattattggctgttatgttgaatagataacgagatatatttggtatgcagatttaccttacaacgtccgtttcgtttttactcatgcaatattcttattacctccagaagagggcataaggctggtgaaaatactgttattggtacggtaaacgcattttgccaggtggcgtctgacaccttacccggcctggaaagcccgcaatttcagcgcgcacccgaatataatattcaggtgcgctcgataatattaaaaatctattctgctgcccgcgtgacttattattttaactggctcaacggttttatttttccatgcagcgccggattatcgctttcgtctttcaggcgcactccggtaagccgccgcaaaaaggcctgctccagtagccaggccagcttaaaagcggcggcatcaaagctcagtccttccggacggatattagaaatacagttgcgctccgactccagccgctgacgatgcggctgccaggttaaatacaccccgaggctatccggcgaggagagcccgggcctttcgccaatcaatatcgccaccgctctggccttcagcgtttcgcctatatcatcgcccagcgcgacccgcgactggtgcgccagcaccaccggggccaggctcaggccgagggttttcagatagggcagcagggcgcgaatcagcggcaccgcctggcgctgcacggcgtacgacgacagcccgtcgccaatcaccagcagcaggtcggcggggcgcgcgccgctggcggcgaggtcggcgcggctctcttcgttcagctgtcgccccagatccgggcgattcagatagacatggcgatcgctggcggcgctgcggacggtcagcgtcgacagccccagctccgccagcggctggactaactggtcgctggcgaaaggctggtgaatggcatcgcgcgcccgggcgtgggcgaggccgaaattcagcacttcgcgggtcggcaggctggcgccgctgcgccccagcgcaatccgcgcatcggtaaattcacgcagcgggttccaggcgtcgggaggattcataccggttctccttgcggcaggacggaaagcagcggatggcgggcatcggtcagacgcagcgcgccgtggcggtcaataatttgcatcttcgtcagccagtcggcgaactcaggcgcatgctgtaaacccagcagtcggcgggcgtaaagggcatcgtggaacgaggtgctttggtagttgagcataatatcgtcagcccccggaacgccgatcaaaaaggtcagcccggccgcgcagagcagcgtcagcagggtatccatatcgtcctgatccgcttcggcgtgattggtgtagcaaacgtcgcagccgatgggcagccccatcagcttgccgcagaagtgatcttccagcccggcgcggataatctgcttaccatcgtacagatactccgggccaataaagcccaccaccgtattgaccagcagcggttcaaaatggcgggcgacggcataggcccgggcttcgcaggtctgctgatcaacgccgtggtgggcgttggcggaaagacagctgccctggccggtttcaaaatacatcacgttgttgcccagcgtgccgcggttcaggctaagcgccgcttcccgcgcttcctgcagcagcgccagattaatgccgaaaccgctgttggcggcttcggtaccggccaccgactggaacaccagatccaccggtgcgccgcgctcaatcagctgcagggtgttggtgacgtgggtcaaaatgcacgactgggtggggatggcgaagcgctgaataatatcgtcaagcatatggttcagctgcgccagcaccggcaggctgtcgctggccggattgatgccgatcaccgcgtccccggcgccgtacagcaggccgtcgagcatgctggcggcgatgcctttcatatcatcggtcgggtgattgggctgcaggcgcacgctcaggcgccccggcaggccgatggtattgcgaaaacgggtgacgacccggcatttgctggcggcgaggatcagatcctgattgcgcatcagcttgctgaccgcggcggccatctccggggttatcgcgcgggcgacctggcgcagcgccgcttcatcggtggcgtcgtcgagcagccagtcgcgaaaatcgccgaccgtaaggtggcgaatcgccgcgaagccccgggcgtcgtgggtatcgaggatcagccgggtcacctcatcctgctcgtagggaatcagcggattatcgagaatctccgtgagcggaacctccgccagcgccatttttgccgccatccgctcttcggcggagccggcgataacgcccgccagcgcgtcgccggaacgcgcaggggaggccttcgccatcaaggttttcagactatcaaagcgccatacctggcccgatagcgtggttttatacatgtgtcgcctcctcaggagaccgtacgcagctgcggatccaccgccgcgcgctggcgggccgctgcggtcttgcgaaaccacaggtagctgccgagcatcatggcggcgaaaatcagcgccagcagggtgttgtaccagaccatcgccaccaggcagagtaccgccatggccagcgcgaaggccggcgcccacggatagagcggcgcgcggaacggtcgaatcagcttcggctcgctgcggcgcagtttaaacagcgccgccatcgaggtgatatacataacaatagcgccaaataccgacatcgtgacgatacaggcggtcagcggcatcccgctaatggtgatcagcgaatcggagaaaatggcggcgatgcccaccacgccaccggcgaggatcgccagatgcggcgtgcgggtgcggcggttcagcgtcgccaggctggcggggagatagcccgcgcgcgccagcgagtaaatctgccgcgagtagcccatgataatcccgtggaacgaggccaccaggccgaagagtcccagccacaccagcatatgcagccagccgctgctgttgccgaccaccattttcatcgcctgcggcagcgggtcgttaatattggccagggttcgccagtcgcccacgccgccggcaaaaatcatcacgccaatcgccagcacggtcagggtcaggatgccgccgcccagcgcccggggaatggtgcgctgcggatccttcgcctcttcggcggccatcgatgcgccttcaatcgccagaaagaaccagatagcgaacgggatggcggcaaacatccccggcagcgccaggccgctgaagctctccgcgcccgcccagccgttagcggtaaagtggctccaggagaagcccggcgcgacaacgcccataaacaccagcagttcgaaaatcgctaataacgtcaccaccagctcaaaggtcgcggcgatacccacgccgagaatattcagcgtcataaagatgatgtaggcgccgcaggccacccatttggggtcgagcgccggaaactgcacgttaagataggcgccgatggccatggcgatggcgggcggggcgaagacgaattcaatcagggtcgcgaagccggcgataaacccgccggtcgggccaaaggcgcggtaggcgtaggcaaaaggcccgcccgcatgcggaatggcggtggtcagctcggtaaagctaaaaataaaggcgcagtacatcgcggcgatggccagcgcgacgatcataaagcccagcgtcccggcctgggaccagccgtagctccagccaaaatactctccggaaataaccagcccaacggcgatcccccataagcggaaactgccgagcgttctttttagcgttgtggtttgctctgtcatgttcgttgcctcgccagataaagatatcgggagggttgcaaagagaatgccagggcagcccgcagggggagcgtagcgaatcatcctcgcgtactccgtgtacgctccggttctttcgcgctgtccgtgtccaaactgtctgcaacgattacgcctgttgggataagctctaagccaacgaggatcaaaaaaggggcagactgcgcccggcgagagagtcgccgtggtgcagctgcccgcaaatgtggcgttactggtgcacgatggcgccagcgtctttttgaattaccggacctgctttcacctgcaggttaagtcctttactctccagctcggcgttgcgaatgcgcagaccgcggtcggcttcaatattgacgttgctaaaatggaaaccgctgagcggcgcttccggggtaccgataatataggccgccgctttgctgtcgcctgtggaggttaaattttcaacggtgatattactgaagtgcggagtcttgtatttatcgaacggctgtttcgggtcgctgtccggcggatagatctgttcgccgagggtaaagccgcctgcctgcaacagcttatcgacctcggcctgcacaatcggcgcggctttgtaataggcggagaacaccagcggcacctcaacgttatgcattctggtattgcggtagacgatattttttacctcaccgcctttgccgcgcgggcttttaatccgaataccgtacatcgaaccttcgaaggtattgttttccaccagcacgttattcacgccgcctgcgctctcgctgccgatggagatcccgcgcccctgcttcagggtgttgttggcgatatagatgttatccaccacgccctccgggaagcgcgggtcggctttttccgccttgatggcaatatggtcgtcgttacagtcgatatagttgttggtaatacggatattctggctatcgataggatcgatggcgtcggtattcggcgcatgccacggcgaaagaatacgcgtgccgttgatatcgacatcgtgcgcgtagcgggtgaccacgtggaagctgggtgaatgggtgagggtcacgccgtagataagcacgttgctggcgcgggtgatataaatcagccgcggtcggtcggtaccgcctttcttgccggtggcgcggatattttcccgccagcgctcccaccacaccgcgccctggccgtcgatagtgccttcaccgacgatggccacgttttgcgcgtcggcgatgctgataaacggcagccagccgttttcagcttcggcgtatcgcgttttatcatcgccgcgataggcagccacttcggttgaggccaccagggtggcgtctttctccagcttaagctgaatattattcttcagaaacagcgggttggtcaggaaattaccttttggcaccagcaccgttccccctccggcggcggcgcagtcatcaatcgctttttgaatggcatcggtgttgagcgcgatttgcagccgatggccttctgcgccgtagtgggtgatatcacagattttatcgggaaacttcacggaactcgcggcctgagcggcgtacagcggtagaagaccgacggcggcagcggcggcccacagaggtaaagcgcggggtatcatgacattatccttttttggtttattgttttgtaaaactagcaccaatgttttgattttatgagtgtggcgatcacggtttgtcctttgtcgttattctgcccataactggcgctgatgatttgggcgaatgcatagatgacaggcccggccgctttgcaatttggcgacaggcggggtataaggaatctcttatctggatgtttagatgtctatacgcccatgaggtcaaatgcaaacaacacaacaacaaggtgggcagcttaagcgcaccatgaagacccgccacctgattatgctgtcgctgggtggcgttattggcacagggctattttttaataccggctatatcatctccaccaccggagcggcgggtacgctgctggcctatctgattggcgcgctggtggtctggctggtgatgcagtgtctgggcgaactctcggtggcgatgccggaaaccggggcgttccacgtctacgccgcgcgctatctcggcccggcgaccgggtacaccgtcgcctggctctactggctaacctggaccgtcgcgcttggctcaagcttcaccgccgccggattctgcatgcagtactggttcccgcaggtgccggtatgggtctggtgcgtggtgttctgcgcggtgattttcgcgctcaacgttatctccacccgcttctttgccgaaggtgaattctggttctcgctggtgaaggtggtcaccattatcgcctttattattctcggcggggcggcgatcttcggcatcattccgatgcaggatggctccccggcgccggggctgcgcaatatcaccgccgaaggctggttcccgcacggcggtctgccgatcctgatgaccatggtggcggttaacttcgctttctccggcaccgagcttatcggcatcgcggcgggggaaacggagaatccgcataaagtcattccggtggccattcgtaccaccatcgcccggctgattatcttttttatcggcaccgtcttcgtgctggcggcgctgattccgatgcagcaggcgggagtcgaaaaaagcccgtttgtgctggtgttcgaaaaggtggggatcccctacgcggcggatatctttaactttgtgatcctgacggcgattctgtcggcggccaactctggcctctacgcctccgggcggatgctgtggtcgctctccaatgaaaaaacgctgccggcctgttttactaaattaaccaaaaacggcgtgccgctgacggcgatttcagtcagcatgctcggcggcgtgctggcgctcttctccagcgtcgtggccccggatacggtgtttgtcgcgctgtcggcgatttccggcttcgcggtggtggcggtatggctgagcatctgcgcctcgcactttatgttccgccgccgccatctgcagcaggggaaggcgctaagcgaactgcactaccgcgcgccgtggtatccgctggtgccggcgctgggatttgtgctttgcctggtggcctgcgtgggtctggcgtttgacccgagtcagaggattgcgctgtggtgcgggatcccgttcgtggcactgtgttatggtgcgtattatctgactcgttcacggaaactcacccaggagcctcaacatgtcgcagaataatccgttaaccgccctccttgacgcaaagccctttatcctgctggacggcgcgatggcgacggagctggaagcgcgcggctgcaatcttgccgacagcctgtggtcggcgaaagtgctggtcgacaacccggagcttatccgcgaagttcacctcgactatttccgcgccggcgcgcaggtggcgatcaccgccagctatcaggcgacgccggcgggctttgccgcccgcggcctcgatgaagcgcagtcgaaagcgctgatcggcaaaagcgttgagctggcccgcaaggcgcgggaggcgtatctggcggaaaacccgcaggcgggcgcgctgctggttgccggttcggtcgggccgtacggcgccttcctggcggacggttcggagtatcgcggcgattatgtccgcagccgtgaggaatttcaggcgtttcatcgtccgcgcgtggaagcgctgctcgacgccggggccgatctgctggcctgcgaaacgatgccgaatttcgccgagatgaaggcgctggcggagctgctgaccgcctatccgcgcgcgcgggcgtggttctcgtttaccctgcgcgatgcgcagcatctcagcgacggcacgccgctgcgggaagtgattggtgtgctggcaaactatccgcaggtggtggcgctgggcattaactgtatcgcgctggagaacaccaccgccgcgctggcgcatctgcatagcctgacggctctgccgctggtggtttatcctaactccggggagcactatgacccggtatccaagacctggcatcaccacggcgaagcctgtgcaacgctggcgggatatttaccccagtggctggcggcgggggcgaagctgattggcggctgctgccgcacgacgccgaaggatattgccgaactgaacgcgcggcgttgagtttgcgccgggtggcggctgatgccttacccggccgacaacgtgcacgaatcgtaggccgggtaagcgtaagcgctacccggcatcaatcacccggcatccgctaacacaaacatcccgtacgggtggatttcgagatagtaatgctcgccgacgtccggctgcagccgcgtcgcgttcacctgcagcaaaatttcctgcccgtgccactctaccgtcacctcgtactgcggtcccatataggccacgtgacggatcgtgcagcgctggctctcctcgccgcgatcgctcagggtgatcgcctccgggcggacgccgacgctgccctcgccgtgggcggcaaaatgcggcggcctcggcagccgatagccataaatatcgacgaaaccctcgctgaaggcggccgggaacaggttggcatcgcccataaagcttgccataaagcgcgacgcaggctggcggtaaagatcctgcggcgagccgatctgcatgatatgccccttattcatcaccagcacggtatcggaaaccgcaaaggcttcactctgatcgtgggtcacgtacagcgaggtgatatcaaactgcttttgcagttcgcggatcttatcgcgcatgctgcgccgcaggttggcgtcgaggttacttaagggctcatcaaacagcagcacctttggcttgaggatcagggcgcgcgccagcgccacgcgctgctgctggccgccggagatctgatcgacatagcggtcttcgaagccttccagatccaccatcgccagcgcctccttcacccgcgctttcacatcgccgcgcgacgcgccgagcatcttcagaccgtagccgacgttgtcccccagcgacatatgcggaaacagggcgtaagactgaaacaccatacagatgtcgcgctgctgaatggatcgatgggtcacgtcttcgccatcgatgaaaatctgcccttcgctcggtttttccagcccggcgaccaggcgcaggatggtggtcttaccgcagccggaagggccgagcagggtcaccatttgcccctgcgggatggtgagattgatattgtcgataaccgtgttgctgccgaatcgcttggtgacgttgcgcagttcaacaaaatttttctgactcatagtgcgctccattacgcctggtttttggcttttgaccgggagatacgcgcttccccgatcagccagtcaaagataaaaataatcgccagcatcactacgatcagaatcgatccgtaggcgatcgccacgccgtattcgccgtcttccacccggttgaggatataggcggtagcgacgcgggtgtccggcgtcacgaggaacacaatggcgctgacggtggtaatggagcgcacaaagctgtagatcagcgccgagaggatcgccgggcgcagcagcggcagcaggatatgcgtaatggtgcgcagggaacccgcgcgcaggctgagcgacgcttcgtccagcgatttgtcgatctggcctaaaccggcaatgcccgcccggatgcccaccggcacgttacgcatcaccatcgagataatcacaatcgctgccgttccggtgaggtacaccggcgcgctgttaaaggcgagaatataggagacgcccgccacggtgcccggcaccgcgaagcacagcatggtggtgaactcgatggtctttttgcctttaaactgctgacgcaccacgatccaggcgatcagcaggccgaaggcggcggtgatcggcgcggcgatcccggcgtagagcagggtatcgagcagcgaaggccaggcaccgtcgctcatcccctggccgaacagcttgataaagttatccagcgtcagggtgtagtccacgccccagttaacggtaaagctgccgtagaaaatgctgccgtagagcagggcgttgaaggcgatccacaccgccagaatggcgatcacgctccacaccagggtcaccggcagcggctgcacgtcgccgcgataggacttaccggaaaccgtgacgtacgagcgcttgccgatccacatatactgaatgcagaacaccagcagcgagaacagcagcaggaacgcgcccagggtactggcggcctgataatcgagctgcgaaccggtgatatagaagtagatttgcgtcgccagcacgtcgaagttgccgccgagcaccagcgggttgctgaagtcggccagcgactggacgatgacaattaaaaacgcgttcgccagcgcaggtttcagcagcgggacgaagacgccgttaaaggtctgccagcggctggcgcgcagggtgtacgacgcctcctccagcgacggatgaatggttttaatcgcgccgtcgaggatcataaacgccatcggagtgaacgccagcacctgcgccagccagatgccggtaaacccgtacagccagttggtgttggttaagccgaaccagtcgaccatcagctcggtgacgtagccggaacggcccatcatcagggtgacgccgaggccgacgacaaacggcggggtgacgatcggcagaatcgagaaaatgcggccaataatcgcgctgcgcttggcgatgcgggtggtgtaaatcgccagcaccaggccaaagaaggtgcagccgatgcctaccgcaatcgacagggcgatggagttgaggatcacctggacgatatgcgcctgcgacagcacggccataaacgccagcggggcaaactcgccggcgtcgttggtgaacatcgggatgaaaatggcgatgctcggccagacgataaagacgccgattaacgccacgatggtgaccagcgaaccaatcacaaagcggtcgccgcccagccattccaggcgggtgagcgccagggtcatgatggcgcccagcgcgacaaacagcacgagggtggcgtagcctaacccgcggccttccacggtggcgctgacgacgataaacgccatacagaggagcgcccagccggcgtcgaggtagtggcggctgcgctgctcccggctggcttcctgccatggacgaatcagcagcaggctcggcaggagataccacagccagctgatattgaactgtgaccagccgtaggccgcgagaatttcatcttgcgtggactccagcagaccgtaatccaggctccagctcggcagcagggcgaacgccagccagccgaataaaacccaaaggaatatcgcatcccgctttttcacgggatggagtgcaagtgtgtgtgacataagttttccggtgtcgtaggccgggtagggcgtggatgccgccacccggcaaatgaacgcagtgcgggcttatttacccatcttcacttcgctaacccatttattgatgagcgctttacgcacgtccgttgagccgtatttatccatgtcgtagttgataagcttcaggtcgtcgagcttcagcgagttcggcgaagtttcggcggtagtgttggtcaggatctgataagacttgcctttcttccacgccagctcctgggcctctttcgacagcacccagtcgacaaacagtttggcgttgtcgaggttgcgcgcgcccttcaggatactgacgccgccaatttcgtagccggtgccttcgcacggcgagatcagctccagcggcgcgccctgttctttttccagcgaatagtcgtgcaggaagccgatgccgatggccgtttcaccgcgggcggcgttgcgcgccggggcgataccggacttagtgtactgggagacgttagcgttgagctgtttaagataatcgaaagcctgatcgtctccccacagctgggcgaaggtcgccagcgcggtgtaggcggtgccggagctctgcgggtcggcaatctggatttcgcctttgtattccggtttggtcagatccttccagcattttggcaccggcaggtttttctctttcaggcgctgggtgttcacgccgaagccgagaatgccgacgtacaccgccgaggagtagttgcctttcagcttcgccggatcgcggaactgctccatcacctgcgtaagattcggcgatttatagggctgcagcaggcccatttcgccggcctgggactgcgggtcgagggtgccgccgtaccagacatccgcctgcgggtttttcttctcggcatcgaccttcgccagcgtgctgccggagccgttgcgaataaacgaggtttttacgtcatatttttcgccgaaggctttagtttccgcctcacacatttcgttggtggcgctgcaatagaccaccagacgacctttggcgtgcgccgcgccgcttaacgtcgccagcgcaatgccggaagcaatcagggtagtgaccagcgtttttttcattattttatcctttgagcagcagaggtagtaatgctcgccatcagcagcggcatcagcaataaacccatcagaactgcggcgaccgagagtaaactgaacatccccgaccagccgtagcgttcaatgaccagcgacagaggccagcccgccagcgctgcccccagataggcgaacaggccgagaaatccgctgatggaaccggccgccgctttgtgtccgcactccaccgccgcgaggccaatcagcatttgcgggccaaaaacgaagaagcccaccgtaaagaaacaaaccgccagcagcgcgtagtggtgtaccggcgccagccagagcgcggcgacggagaccatcagccccagcgtgaacagtaaaatcatcggcgcccgctggccgctgaacagcagatccgagccccatccggcgaacagcgcgccgagcaggccgcccgcttcaaacagcatcaccgtggcgttggcgctgagcagattgacgccgtggctctccgtcagccagatgttgccccagtcgttgagcgcgatgcggatcaggtagaccagcacataagagacgcccagcagccagatcatcgggttcttcagcatcgtggtacgcagcatctgccacagccccatcggcgggctttgccgctcctggcgcagctccagcgggtcgttacgccaggcgcccaccgacggcaatccctcttcgcggggcgttcctttcaggtgcagcgttaaccagatgcctgatgccatgctgatcatccccggcgccagcatcgccgcctgccagccccaccagtgggcggcaaaggcgctaatcagcgggataatcgccccgccgatgttgatcgacatattccagcagccccaccagaagccgcgttcgttgcgcgagtaccagtgggttagcaggcgggcgcagggaggccagccccagccctgaaaaaatccgttcagcgtccagaccgccagcagcagcgtcagcgactcgccgaaggcgaacaccacgttcagcagaccggtggcgaacaggcccgcgcccataaaccagcgctgcccgtggctgtcgtgccacagcccggcggtaaacttcgacaggccgtaggtcaggtaaaatagcgaccccagcaggccaatatcgcctttatccaggcccagatccgtttgcagcgctggcagaacgtagttgacgcttttgcgcgtcaggtaaaacgccgcatacccgatgaccatgtacatcagcagctgcggacgcagcgtcctgtaacgttgattaatgtcggttgctgagcgcatagccgtctccgttttgctgactatatgaaagtgaaatcgaaaggggatgagagaaagtccggagtgactaagactttttcctggttagctggctgtttgttgcaaatttgtgggcaagttaacaattacgcgtgtgccgcgctgcgactccagagtcagctctccgcccagggcgctgacccgctcacgcatgccctgaatgccgaagccggccattttgtcggggctgatgccgataccgttgtccttcacctccaggcgcagcagcgtcccctgctgatacagggcaatggcaacctcgctggcgtcggcgtgtttacagacgttgttaagcagctcctgcagcagccgatagagggtaaaacgtaccgtttcgctctccggcgtggcggtgagccggtagtcaaagcggcagcggataccgcgctcggcaaaggcaaactcattgagcaaatggtgcagcgcctctttaaacgacagctcatcgagggccggcgggcgtagctggcgcagcagctggcgggtggagtggtgaatacgccgggcgagatcgttaatctggctggcggcggcctgggtttgcgccggatcgcgcgcccgcttcaccagctgcgactggatctgaatggcggtaatattctggccgatttcgtcgtgcagctcgcgcgccaggcttttgcgcgtatcctcttcggtatggatcagcttttcggccagcgcccgccgggccgccagctccgcctccagccgctggcggtagtggtgcaggttttgcgccaggtgctgctggcggctgatggcaatgcccagcccgatgccgagcagcgcctgggtcgccagaaaaatctccagctccaccagattgctgaatccaacgccaacctggcgggcgatggtgatcatcatgctgcccagcaggccggaaaggacgccgccctgccagccgaacttccacgccatcaccacgttgggcagaaacaccacaattaacagcaggcgctcgatttccggcgacagtaccatctgggtgccgatgccgatgataaagaacaggctgcaccagatgatcagcgaggtgcgcagcggtggattattggtatccagccccagcagatggtagcggtgctgctggcgcaggaattcaaaaatcagatagacaaacggcgtcagcagcaccccgccggtaaacgaggccaggccgagcatcatcgccgggcttttcacaaacggcgagagcagcgcggtgttgagcagcgcgctggcggtgaccgtagccagcagcagcgtcagccgctgccagtaaaggggaaagcggtgccagaactgttgggcgatgccggcgggaagcaggccgatcaacggcgcggccagcagaatatagccgttcagcagctgttcgccgtgcagccagagcagcatcagcaccggaggcagcaccagcgcgggccagtagcggcgcgaaagcaggatcagcagcgccagatagacgccgtgcggcaggaacagcgccgcctgctggccgttatgggtcaggtaaaacccgagcgtccacagcatcagccagccgcttccccaggccagcacgatgaacagcgagatgacgctgtggcgaaggctgcgcgacattaatgacccgccagcagctggtggtcgagggcgaaatggaccagatcaatggtgctgtgacactgtagtttgcccagcacgttggcgcgatggacgtgaaccgttttgtggctgagttcgagcttaaaggcgatctccttgacgctgtcgcctttaaccagcaaatcaaagacttcgcgttcacgcggggtgagcacttccagcacctgcgccggttgttctccgccgcgcagcgcccgcagcgcatcggcgcacaggtagtgtccgcccataccgacggaacgcaccgcctggaccaactcttccgggccgcagcgtttggtcagatagccgctggcgccggcatcaagcgcgctctgcacgaaggtgggggtgtcgtaaatactgagaataatggcgcggaactgcggcttttgcgcgcgcaggcgctttagcaggctcaggccgttctcatccggcatggcgatatccatgaccgccacgtcgacgtcgtcgcgcagcagcgccggccaggcttccgccgcgcggctgaactggccaaccacctcgagatcttcttcgaggctgagtaactgcgcaaagcctgaacgcaccaccacatggtcatcgaccagcaccactcgaatcatgtttcttctctctcagcgcatcatggttctatgatgcctgccgccgctgcgctggcaatcaatcaggcgcagttatgcaacgaatgtaacaaaatcgcaatacacttcatccttcaagctgcctctttgttggcttcgtttgcccgccccggtcactgacttatgtcagctcccggggacgaacaaccttgccgcctcgatgcagcatgaatgattttgtgtataagcattgccgctttttttctaaaaacgctttgttcttagcaagatgttttaattcctttatcaaattcaggcgcaacgaaatactgcccccataacaagacaggggagcagacaacatggttttttcatcgggtatcacactcattgccgcgctggcgctggcggcgttccaggcccaggcggtcaacgttaccgtggcgtatcagacctccgccgagccggcgaaagtcgcccaggcggacaacaccttcgccaaagcgagcggggcgaccgtcgactggcgcaagtttgacagcggcgcgagcatcgtgcgggcgctggcttccggcgacgtgcagatcggcaacctcggctccagcccgctggcggtcgccgccacccagcaggtgccgattgaagtctttctgctggcctcaaagctcggtaactccgaagcgctggtagtgaagaagagcatcaccaaaccgcaggacctgatcggcaaacgcatcgccgtgccatttatctccaccacccactacagcctgctgtcggcgctgaagcactgggggattaaaccggggcaggtgcagatcctcaacctgcagccgccggcgattattgccgcctggcagcgtggcgacattgacggcgcctacgtctgggcgccggcggttaacgcgctggaaaaagacggcacggttctcaccgactcgtcgcaggtgggcgagtggggcgcgccgacgctggacgtgtgggtggtacgcaaagactttgccgaaaagcatcctgacatcgtcaaagccttcgccaaaagcgccattgacgcgcagcagccctatatcgccaacccggatgagtggctgaagcagccggagaacatcagcaagctggcgcgcttaagcggcgtaccggaagccgacgtcccggggctggtgaaaggcaatacctacctgaccgccgcccagcaggcgcaggagctgaacgggccggtgaataaagccatcatcgacaccgctaaattccttaaagagcagggcaaagtgcccgccgccggtagcgactacagccagtacgtcaccgaccgttttgtgaagtaaaggaggtcatgatgctgcaaatctcgcatctttccgccgattacggcggtaaaccggcgctggcggatatcaacctgacgctggacagcggcgaactgctggtggtcctggggccctccggctgcggtaaaaccacgctgctgaacctgattgccggattcgtgccttatcagcacggcagcatcacccttgaaggccagcgggttgaagggccgggcgccgatcgcggcgtggtgtttcagcacgaagggctgctgccgtggcgcaacgtgcaggataacgtcgcgctcgggctgcagctggccggggtcgacaaaacgcagcgccgggcaaccgccgcgcagatgctaaaaaaagtgggcctcgaaggggcggaaaagcgctttatctggcagctctccggcggccagcgtcagcgggtaggcattgcccgcgcgctggcggccaacccgcagctgctgctgcttgatgaaccgtttggcgcgctggatgcctttacccgcgagcagatgcaaaccctgttgctcagcctgtggcacgagaccggtaagaaggtgctgctgattacccacgatatcgaagaggcggtgtttatggccaccgaactggtactactctcgccggggccgggccgcgtgctcgaacggctgccgctcgattttggccgccgcttcgtcgccggtgaatcctgccgcagcattaaatcggacccgcggtttatcgaacagcgcgaatacgtcctcagccgggtatttgaacaacgggaggctttctcatgagcgtggtcatcaatgacaaaccgcgtcagcgggggctgaagtggcgctggccgctctcgcgtcagctcagcctgagcgtggcgaccctggcggtactgctggctatctggtgggccgttgccgccctgcagctgattagtccgctgtttctgccgccgccgggacaggtattgcagaaacttatcgctattgccggtccgcagggttttatggacgccaccctctggcagcacctggcggcgagcctgacgcgtatcgttatcgcgctgctggcggcggtactgctcggcgtgccggtggggatcgccatggggctgagccccacggtacgcgggatcctcgacccgctgatcgagctttatcgcccggtgcccccgctggcctatttaccgctgatggtgatctggttcggcatcggcgagacctcgaagatcctgctgatctacctggcgatattcgcaccggtggcgatgtcggcgctggcgggggttaagagcgcccagcaggtgcgcattcgcgccgcgcaatctttaggggccagccgggcgcaggtgctgtggctggtgatcctgcccggcgcgctgccggagatcctcaccggcctgcgcattgggctcggcgtgggctggtcgacgctggtggccgcggagctgattgccgccacccgcgggttaggttttatggtgcagtccgccggtgagttcctcgccaccgacgtggtgctggccgggatcgcggtgattgccatcatcgcctttttactggaactggggctgcgcgcgctgcagcgtcgcctgacgccctggcatggagaagtacaatgagcgaacgtttaagcattaccccgctggggccgtatattggcgcgcaggtatccggggtcgacatcacccgcccgctgagcgacaaccagtttgagcagctgtatcacgcggtgctgcgtcaccaggtggtgttcctgcgcgagcaaaacatcactcccgagcagcagcgggatctcgccctgcgctttggcgacctgcatgttcatccggtctatccgcacgcgcccggcgtggatgagattatcgtgctcgatacccacgacgataacccgccggataacgacaactggcacaccgatgtcacctttatagagacgccgcccgccggggcgatcctcgcggcaaaagagctgccgtcaaccggcggcgacaccctgtggaccagcggcattgcggcctatgaggcgctctccgcgcctttgcgccagctgttaagcggcctgcgcgcggagcatgattttcgcaaatcgtttcaggagtacaaataccgcaaaagcgaagaggagcatcagcgctggctggaggcggtcgcgaaaaatccgccgctgctgcatccggtggtgcgcacccatccggtgaccgggaagcaggcgctgtttgtcaatgagggctttaccacccgcatcgttgacgtcacggagaaagagagcgaggcgctgctcggcttcctgtttgctcacgttactaaaccggacttccaggtgcgctggcgctggcagccgaacgacgtggccatttgggataaccgcgtcacccagcactacgccaacgccgattacctgccgcagcggcgcattatgcaccgggcgacgattctcggggataaaccctattatcgggcggggtaatgcttgtagcccggccgcgcgccgtggagaacatcgggaagcggtattgcacgctgcttcccggaggcggcgcttaacgcgccttgtacgggctaccggtccgcagaaagcggtaaacccgtagcccggctaaggcgcaatgcgccgcaagccgggaaaaggcttttatgccgatttttgcgcgtccagatgtaccccaatatagcgctgatagcggttcgccttcaggtaggtcaagtccaccagcaccagaccatccacgcagttgttgaaatccgggtcgctgccgaaatcgataaactgcacgccgcccggctcgcaaacttccgagtactgcttatacagcggcgggatcgcgcagccgaggttgccgagcagggacttcagccgcgccagatcgtcgttgtaatcttctccgccaaactgcgccagcacatcgggcagcgaggccggataagggcggcgcgactccgccagcggatgcgtcgccgggaaccacagtcgatagaacgcgaccagcagatcgcgcgccgacggcggcagcccgccggaaatcgacaccgggccgaacagatagcgatagtgcggatagcgcgccagatacgcgccgatgccggaccacaggtagtccagtccgcggcggccccagtagcgcggctggataaagctgcgccccagctcaattccgtgctgcagaatatcgtccatgcgcgcgtcgtaatggaacaggctgtagctgtagacgccgttcaggccgcgcttttccagctgcatcgcggtcggcataaagcggtaagcgccgacgatttccaggtcttcttcatcccacagaatcagatgcagatagtcgtcgtcgtaaccgtcaacgtcgcgacgtttgccgctgccttcgcccaccgcgcggaaggcgatttcccgcaggcggcccagttcgcgcagcaccggcgcatcttcctggccgcggcgctgccagagataaatcactttgccatccgccgtgcgccccagcgtttccgcccggcccagttcgcgcttgagcagggcgcggtcttcgggtcgggcgatagcgctttcgcttttaaatacgccgggctgcccttttgccagcagctccaggtggcgatagcagcgttcggtcagctcgcgaacagagcgctgaggatcgaaccagcttgaccaggcaatctgttggccgaaattaaccggcaggctgccgttgcggcggcgaaacatttgctgcatcagcagcagcagcggcaggctatcggaaatcagcgtgctggcgtaaaacagcgcgctgttgcgcgcgcggatccacgccggcagcagcggggcgcggtatttcgccgccagcttaataaatccggagtgccattttttatcgcgaataccgcgccgggtgaggcgtgaaacttcacccgccgggaagaaaatcagcacgccgccgttttgcagctgctggtccatctgctgcagcgccgctttggcggttcggccgttgatattatcgaccggaataaacagcgagctcagcggttcaaggtgggtcagcatgcggttggtgaccactttgacgtcgcggcgcacgcgggacaccgcgtagagcagggccaggccgtcaagcgtaccggtggggtggttggcgataatgaccagcgggccatgttcggggatttgttcgagatcgtgcgccgggatagcgcagcggatattaagatgttcgagcacctgttcgaccgtatccagtcctttcaggtgatgatgacgcgcggcaaactgctgaaactcttcctcatgcaggagctttttcagcacctttttctgccagagcgctggctttgcctgaggccacaggtcatcgatgacattgtcgagactaaacatagcggcacctcctccgtcctgcccagacagtagaaggcgcagatgtcgctcagattacagttgagtgaagatttgggatatttccccgggttgcggctggcgccttacccgggctaccggagcagatcgtagccccggtaagcgtagcgcgaccgggggtttactggcgttcgccgcacaaaaaatcgtgaatttcgccaccccaattatcgggatataacccgcgccgtacatcccggtgaaaggctgaaaaaggccaatcacaaacctgtcgtacccaaccgtgttttacaggattaatgtaggtgtaatcgatatgccggcggtagtcatcttcatcgcggattacatgttcccagaaacgcggttgccagacattttcttgttttaatgctttgctaaagcaaccttttatgtcccgccatctggcggagaaatcgctatcgtctccgggtaatgtccagatgcaatgaagatgttcaggaaggataacccatgcatcaatgtaaaagggttttcgccgtttgatggtgaggatggcgtgacgtaaagtaccgatgtgctcggtcagaagtctgctttttcggtttcgcaaattaactgtaaaaaaccaggttccacccttcaggtaataacgacggtaggcccaccatgcagcgctcctttgcaaaagatagtgtcttaagcggcagggtagagtcggggtaacagtctggcaagaatccaaagataatggtggaaagagtctcgcaactttttgcagcagaggaattccccgggttgcggctgatgccttacccgggctaccggagcaggtttgtagccccggtaagcgtagcgcgaccggggaacggtaatagccgaattaacgcaggattttcttttcggcgagatcgagggcgaagtagctgaagatcagatccgcgccggcgcgcttgattgcgccgaggctttccagcaccactttctcttcatcgatagcgccggcctgggcggcgaacttaatcatcgcgtattcaccgctcacctggtacgcgccgagcggcaggttggtgcgctcgcgcagatcgcgcaggatatcgagatagggaccggccggtttgaccatcaggcagtcggcgccctgggcttcgtccagcagcgattcgcgaatcgcttcgcggcggttcatcgggctcatctgataggttttacgatcgcctttcagcgcggtacccgcggcttcgcggaacggaccatagaacgatgaagcgaacttggtggagtaggacataatcgccgtatcggtaaatccggcggcgtccagcgcctggcgaatggcctgcacctggccgtccatcgcggcggacggggcgataaaatccgcgcctgcggcagcggcgaccaccgcctgcttaccgaggttgctaagggttaaatcgttatcgacaccgtggtcgcacagcacgccgcagtggccgtgggaggtgtattcgcagaaacaggtgtcggacattacgatcatctccggcaccgcctctttacagatgcgggacatgcgcgctaccaggccgttttcgttccaggtatcgctgccaacggcatcggtatgatgggaaatgccgaaggtcatcaccgaacggataccggcgttggcaatgcgctcgatttcgcgcgccaggtgtctttccggaatacgcatcacgccgggcatcgcttcgatggctttgtaatcgtcgatttcttcttcaacaaagatcggcaacaccaggtcgttcaaactcagtgttgtctcttcaaacatggcacgtagcgaagcggacttgcgcagtcggcgcgggcgagtgattaaatctgtcatggtttgcctgattttgtgaaatgaaaaaagcgagtttacctcaattggcggcgggatgtttcgccaaaacgatccttatctatcgtcggcaaaacatcccaacaggttactggctggcggtctcaatcccggggcggtcgccgcttaattcgctgaccagctcgttgacgccatcgctcatgttgttgaaacgcgtcaatgaagagcgggtgaccaccacaaaggcgccgacgttagcctgcgggttcatcgccatgtaggtgataaaaccgccgccgccgccggtcttctgaataatgcccggctggccgtttttcggcttcatgtagacccagccgagacccagcgcatcggctttgcccggcacgtccatcccgatcaccctcgtcagctggctgcgttgataaatgagcgtctgcatccggtccgcctgctgcccgcgggtgaagaaatcggaagagaggaactgctgcatccagcgcatcatatcgccaggcgtggagtaaacgccgccgctgccgatggccgccagcgtattgttgcacgggctggcccctttctccgggatcatcaggcgccggcactgatcgggcgaaggcgtaaaggtggtgtctttcatccccagcggacgggtaatctgctcttcaaacagctgcggccagggcttgcccgcggcggtagagagcgcatcggccagtaaatcgaacgccagattggaataggaggcctgcgaacccggagcggcttttaacgttgccgtggagagccagttccagcgctgctggcgcgtcggccagacgaacaccggacgatgcgccgcgccgccgggctgctcgcgcggcagggcgctggtatgggtcgccagattcaccagcgtaatgggcgctccctgatatgtcggcacgcgcgcgcccggcggggcgtatttgctcagcggatcgttgagcttcaccacgccctggtcgagaagtttgaccagcatttcgctggtcatcagcttgctcagggaggcgatgcgaatcaccgaatcgagctgcgggtgctcattattgcccgggcgcgtctcgccgaagctgcggaatacgcgctggttaccatcgataaccaccagcgccatgccgatcgcgccgctgccgtagtagatatggttagcgtaacggtcgacaacatccgcagcgaattccgggtcgacgctcggctgcgcggcctgggccgatgtcaacgacgccgcgcacagcgcagcaaaaatgagcagactacgtttcaacgggggcatccatcatggtgaagaaaaatatagagcgtatttatactacgaagcgccgccgagcaaagcgctaataacgccattctgtgcggaaaaacgtaacctggcgtaaaaaatcctttttttgctttcggatagcggctttcgcctgcgggcgcgtatgatattcgttttggctaaacatgggtggcaagagacgatggcggcgaaacgggtagtgatggtagtggatatgcaaaacggcgttttcgcgacgccgcgtattgagcgcgagcgctgcgcggcgcaaattaaccgcctgataaacgtcgcggataccgttatcttcattcagcactgcgaagagggcggtctggaagaggggagcgaaggttttgctttgctgcctgaactgcaccagccggcaggcgcgttgttcgtcaccaagaccgcctgcgacgccttttaccgcacccgcctggaagaggtgctgcgcgaacatcacatcacgcagtttgtgatttgcggctgcgccaccgactactgcgtagataccaccatcaaaaacggcgccagccggggctatgcgattaccgtcgctgaagatgcccataccacagccaaccgcccggcggcgcaggccgtcacgctgatcgcccactacaacgaggtgtggcgtacgctgaccgttccgggcaatcctttacaggtgacatcgacagaaacaattctgaacggatggtcggcgaactaagctgctgatatccggtctcatcatccgcccactttgcttcgctgcgacggctttgcggcgggcgtctttgtggtacacagcacagcaaaacgaaaaagaagttagcaggagagcatgatgtttaaatcctttttccccaaaccggggccgttttttatttctgcctttatgtggtcgctgctggcggtgatcttttggcaggcgggcggcggcgactggctgctgcgggtcaccggcgcatctcaggatgtggcgattagcgcggcgcgcttttggtcgctcaattacctggtgttctacgcgttctacgtattctgcgtgggcgttttcgccctcttttggtttatttacagcccccaccgctggcagtactggtcgatcctcggcacctcgctgattattttcgtcacctggtttctggtcgaggtcggggtggcgatcaacgcttggtacgccccgttctacgatcttattcaggccgcgctggcgacgccgcataaggtcagcattaaccagttttatcaggagattggcatctttctcggcatcgcgcttatcgcggtggtcatcggggtgatgaacaacttcttcgtcagccactacgttttccgctggcgtaccgccatgaacgaacactatatggcgcactggcagcatctgcgccatatcgaaggcgcggcgcagcgtgtgcaggaagataccatgcgctttgcttccaccctggagagcatgggcgtcagcttccttaacgcggtgatgacccttatcgccttcctgccggtgctggtgacgctctccgcgcacgtcccggatttaccgattgtcggccacctgccctacggcctggtgattgccgccattgtctggtcgttaatgggtaccggcctgctggcggtggtggggatcaagctgcccggcctggagttcaaaaaccagcgcgttgaggcagcctatcgtaaagagctggtgtacggcgaagatgacgccaaccgcgcgacgccgccgacggtgcgtgagctgtttggcgccgtgcgccgcaactatttccgcctctatttccactacatgtatttcaatatcgcccgtattctgtatctgcaggtggataacgttttcggtttgttcctgctgtttccgtcgattgttgccggtacgattacgctgggcctgatgacccagatcaccaacgtctttggccaggtccgcggttcgttccagtatctgattagctcatggactacactggttgagctgatgtctatctacaaacgtctgcgcagcttcgagcgcgagctggatggcaaagagctgcagaccgtgacgcaaacattaagttgatcaacgcaaggatgaaccatgccgggagcgcaatccagaatcacttctctcaccctgacgctactggcagggattgtcctcaccgcctgctccagcaagccggagccggagctgaaaaagggcgaaaaggcgattgatgttgccgcggtggtgcggcagaaaatgcccgccagcgtgaaagatcgcgaggcctgggcgcaggccatcgccaaaacctttgccagccagaagctggcgccgacggaagagaacgtctgttcggtgctggcggtggcgcagcaggagtccaactatcaggccgacccggcggtgccggggctgaataaaatcgcctggcaggagattgaccgccgggcggagaaaatgcatatcccggtttttctggtgcataccgcgctgaaaatcaaatcgcccaacggcaaaagctatagcgaacgcctcgatagcgtgaaaaccgaaaagcagctgagcgcgattttcgatgattttatcggcatggtgccgatggggcagaagctgttcggctcgctgaacccggtgcataccggcggcccgatgcaggtcagcatcgccttcgccgagcagcataccgacggctacccgtggaaaatcgacggtaccgtacgccaggaggtgttcagcctgcgcggcggtctgtggttcggcacctatcatctgttgaactatccggcgaactacagcgtaccgctgtaccgttttgccgatttcaacgccggatggtacgccagccgcaacgccgccttccagaacgccgtcgcaaaagcgacgggcgtgaagctggcgctggatggcgatttgattcgttacgatagcgacgaggccggaaccaccgaactggcggtgcgccggttatcctcacagctggcaatgagcgatgatgatatccatcgtcagttaaagaagggcgataccctggcgtttgaagagagcgatctctataagcaggtgtttcgcattgccgataagaaagccggcaaaacgctcccgcgggaggtgctgccgggcattcagcttgagagcccgaaaatcacccgtaacctgacgaccgcctggtttgccaaacgcgttgacgaccggcgggccagctgtatggcgcgccgttagcggcggctgcgccagcggaatatcagcccaggaataccaatgagcacgcagcccgccaggaagggaatcaggccgaacagggtaccgaccaccaggctaatctcgacccgcgggcggctgctgtcctgcatttgaatcagatgctcaaaaacgccgggcgcgtggatcagcatactcagcatttgcgcaccggcccagaagcaaaacagcacaaacagagcgtaagcgatgttgctgccggtgagagagcccctctttttgccgccgttgacggtctttgcaaaggtgaactctgccatcttgacctccgtacttcactttcttgccgttttttccacggcgacgtagagggtaattctggcaacgaaggggggatttcagtatcagattgctggtaatttccgcccaggaatattcctgatttcatcgggttgtgagtttgctacaaatttgtgaaatttagaccgatatcgcaatgtgcgacaattctcaacgccgctacagacccgcggtggcggctatgcgaagatgctttttttgttgtcggagtggttatgaaactcacggaaaaaatccgccgcgattggcactactacgcggtagcgctggggttaatttttattatgaatggcgtggtcgggctgctcgggtatgaaaccgaaggctggcgttcttacgcggttgggctggtgacgtgggtcattagcttctggattgccgggtttattattcgccgccgcccggcagaggaagcgtgaaccggaggtggtgaacccgtagcccggctaagcgcagcgcgagccgggaagatgccgggctgatacatcaaccccggcgcactccccgggtcgcggcgtaaacgcttactcgggctaccgccggcagacggcggtgaacccgttaccgggcttaattcatcgatgttttcagcgcccgatcggcggcgtgacgctcaagcgccagctcaatcaggcggctaatcaggctggtatagtccagaccgctggcctgccatagcttcggatacatgctgatgttggtgaagcccggcagcgtattgatttcgttaatcaccacgtcgttatcggcggtcaggaacacatcgacccgcgccatcccgctgcagccgagggtctgataggcgcgaacggcgatatcgcgaattttatcgtttacatcgctgtcgatggccgccggaaccaccaccttcgcgccctgatcgtcaatgtacttggtgtcataggcgtagaattcgctgttgaggacgatttcaccgcaggtgctggcctgaggattatcgttgcccaataccgcgcactcgatctcacgccctttaatcccctgttcaaccaccactttatggtcaaattcgaaggccagggccacggcctgctgatactgctcttcgctgttgaccttgctgacgcccaccgaggagccctggttcgccggtttgacgaacagcggcaggcccagcttcgcctgcacctcggcaaagctcacctgatgacggttggcgcgggtcagggtaataaaaggcgcaatcgacagcccggcatcgcgcagcagacgcttggtcacgtctttgtccatgcaggcggcggagccgaggacgtcggagccgacgaagggcaggttagccatccgcagcataccctgcagagaaccatcttccccaagggtgccgtgaacaatcgggaaaatgacgtcgatggccgccagcggctggccgctatcagcgttaatcagctgctgcgcttcgcgtccgggaatttgcgccagggtaatatcggatgggcgcagggcaatatgggcggggtcctgcggattgagcagatagttgctggcgtcgttgatatgccactgcccctgcttatcaatccccagcaaaacgacgtcgaagcgcgttttgtcgatggcttccacgatatttttcgctgactgtagcgatacttcatgttctgccgacttaccgccgaaaacgatcccaaccctcatcttagccatttcaacttccatcatgattacatcaaagggcataacatagcatgtgaaacggccgcctggctgccataatattcaccgggtaaagcattgggaggcagcgcgtgaaaggaaaagggcttatcgttctgttggcgctgctggcggccggatattacggctatcgttatcttcccgcgcactataacccgctggcgccgctgcgtctggaggatccgccggggttcatcacccactataagctgcggcgattgacgcccggacagtgcgccaacctgctgaaggaagcgaatcagcgaaatctcatcaccagccgggcggtggccgatagcgggggagagtgccccctgcaaaacgtggttcgggtacgcgattttggcgcggtaaagctcagcagcagcttcctcgccagctgcccgctggcgttaagcagcgcgctgtatctgcaacagcaggcgaaaccgctgactcggcggatgctggggcaagagctccgccaggtcgaccattttggcagctatgcctgccgtaatatttaccatcgtcagaacgcgcggcgcagcgagcacgctaccgcggaggcgctggatatcagcggctttcgtttggccgatggccgacgcatcagcgtgctgaaagggtggcccgatgcgcagtatcacccctggctgcaggcgttactggccggcggttgcagctattacggcaacgctttagggccggactataacgcggcccatgcgaaccattttcacctcggtatgcgcggccaggggttctgtttctgagcataactcgctgtataccacgcttttcaccacgaaattattcgcaacagggcaatctggtgtcataaaacactaaactcgccgtcagcgcatctctggtagtacgtcggacaggggaaattgctaagctagttaataattgccaaaaaattaatgaatacgcgtagttatggaatcctggaaggttaatcttatctccgtctggtttggctgtttttttaccggcctggccatcagccaaattcttccctttttgccgctgtacgtttcccaactgggcgtgacctcgcatgaagcgttatccatgtggtcgggcctgacgtttagcgtcacttttctggtgtcggcgattgtctcgccgatgtgggggagcctcgccgaccgcaaagggcgcaagctgatgctgctgcgcgcctcgctggggatggccatcgccattttacttcaggcgttcgccaccaacgtctggcagctgtttatcctgcgcgcggtgatgggactgacttccggctatattcccaacgccatggcgctggtggcgtctcaggttccgcgcgagcgtagcggctgggcgctgagcacgctgtcgacggcgcagatcagcggcgtgattggcgggccgctgctcggcggtttcctggccgaccacgtcggtttgcgcgccgtatttatcatcaccgcgattttgctgaccgtaagcttcctggtgacgctgtttctgattaaagagggcgcccgaccgcaggtcacgagggcggagcggctgagcggcaaggcggtatttgcctcgctgccctatccgggactggtgatcagcctgtttttcaccactctggtgatccaactttgcaacggctcaatcggcccgattctggcgctgtttatcaagtcgatggcgccggatagcaataacatcgcctttctcgccggcatgatcgccgccgtgccgggcgtgtcggcgctgatttcggctccccgtctggggaaattgggcgacaggatcggcacctcgcggatcctgctggcgacgctgtgctgcgcggtggtgatgttctttgccatgtcgttcgttacgaccccattccagcttggtgtgctgcgtttcctgctcggttttgccgatggggcgatgctgccggcggtgcaaacccttctgctcaaatactgcagcgacagcgtcaccgggcgtattttcggctataaccagtcgtttatgtatcttggcaacgtggccgggccgttgatcggcgcgtcggtctcggccatggccggcttccgctgggtgtttatcgccacggcggttattgtcctgatcaatatctggcagctggccatcatgctgcgccgcagccgccgtcctgcggcttaattccgctctttctcctcggccgcgatggatgcgacagcgtcagtagcggcctcggtgttccttaagctttaaatgtatcaccgatcacaaaacgattattttcccctctcatcctcttctattcctgactgttacgcgtatacagttacgcgtaacagttattgaaaaagaggttttatgcgaaatttatttgatttgtcagggaagcgcgcgctgatcaccggctccgctcaggggattggccatctgctggccggcggcctggcggagtacggcgcggagatcatcatcaacgaccgcacccaggcgcgcgcggaccaggcggcgcaggcgctggtggcgcagggctttcatgcggtaggggtcgcctttgatgtcacccgggcggcgcaggtcgagcaggcgatagcccgcatcgaagaggagatcggcgccattgatattttaattaataacgccgggatccagcggcgtttcccttttaccgaatttccggaggaggagtgggataacgttattgaggtcaatcagaagggcgttttcctggtttctcagcaggtggcgaaatatatgatgggccgccgcgcggggaaaataattaatatttgctcaatgcagagcgagctggggcgtaaaaccattacgccttacgcggcctcgaaaggggcggttaaaatgctgacccgcggcatgtgcgttgagctggccgaatataatattcaggttaacggtatcgcgccgggatattttgccaccgacatgacggccgccctggtcaacgatgaggcgttttccgcctggctgtaccagcgtaccccggcggcgcgctggggaaaaccggaagaactgattggtgccgcggtatatctggcctcgtcggcggcaaactttgttaacggtcatttgctgtttgtggacggcggaatgcttgccgctgtctgaatcacttcgcgtccttcgggcagcagcgtgcccgcactacctgaaggacagagtattaaacccgtgtgatgatattgatatctgaggagtgcttatgcacatgctcgcgaaattacccgcgcgtcgctggtggtatttaatgccgattatatttattacctatagtctggcctaccttgaccgtgcgaattatggttttgccgctgctgcgggaattgaaagcgatttgggtattaccaaaggaacggcatcgcttattggcgcgctattttttctcggctatttctttttccaggtacccggcgcgatatatgcggtaaaacgcagcgtgcgaaaaatgattttctttagcctgattttatggggattctgcgcggcggcgaccgggttcgtcagcaatattccgatgctgatggcgattcgctttacccttggcgtggttgaggcggcggtgatgccggcgatgctgatttatatcagcaactggtttacgaaaaccgagcgttcgcgcgccaacacgttcctgatcctcggaaacccggtgacggtgctgtggatgtccatcgtttccggctacctgattcaggcgtggggctggcgcgaaatgtttatcatcgaaggcattccggcggtactgtgggcggtatgctggtggatactggtgcgcgataaaccgtccgaggtttcctggctgaacgagcaggaaaaagagaccctgcagaaggtgatggacagcgagcagagtcatatcaagccggtgcgcaactacggtgaagcgctgcgctcgcgcaatgtgatcatgctctgcgccgtgcacgcgctgtggagcatcggcgtgtacggcttcatgatgtggatgccgtcgattctgaaaaatgccgcgcagatggatatcgtggcggtgggctggctggcggcggtgccgtacctggcggcaattatcctgatgctgacggtctcctggctgtcggataagttccagaatcgtaaactgtttatttggccgttattgctgattgccgctatcgctttctttggctcctggctggtgggcaaccaggcgttctggctctcctatgcgctactggtcattgccgcggcctgcatgtatgcgccgtatgggccgttcttcgcgcttattcctgaactgctgccgcgcaacgtttccggcgtatcgatgggcttaatcaacagctttggcgcgctcggcgctttccttggtgcgtggctggtggggtacctcaacgggattaccggcgggccgggagtttcctatacctttatggctgtcgcgctgctgtcctccgtcgtgctgatgtacaacgtgcgcgctaacccgcaacccgtttccccggtgacggcaaaaaaggttgccggctaacataaaccgccgctgctgtggtaaggttctctgtgagcataaaagtcgcttgtcgtagagaacctgatgaaaaacaaccggatgacattgcaggatatcgccaacctggcggggctgaataaaatgacggtcagccgttatttacgtgaccccggccaggtttctgagcgcagccgtgagctgatctcaaaggtcatggaagagaacaactatatccctaaccgcgccccggaaatcctgcttaacgcccggagtaaaacgattggcgtgcttattccctccttccgcaaccagatttttgccgatgtgctggccggcattgagtcggtgacctccgcgcaccagtatcagaccctgattgccaactacgaatatgacccgcagcgcgaagagcgcgaagtgctcaatctgctctcttataatatcgatgggctgattttgaccgggaagcagcacagcgatcgcatggtgcagtacgtgcgcgccagcggtatccccgtcgctgaactgatggactacggcggccagcagctggatatccaggtggggttcgataacgaaaaggcggcgtgggatatgactcatgcttttcttgagagcggcaaacgggcgatcgccttttttggttcaatggacgatccccgcgatttaagccgcttccgcggcaccgagctggcgctggcggagcacggcctgaaggcgtatcacatggcgccgcggaccatctcctcggttgcgcttggccggcagatgttcctgcagatgcagaagacgcgcccggatattgacgccattttttgtaccaacgacgatctggcggtgggggtgctgctcgagtgccaggcgcaggggaaagccgttccgcaggagatcgccatcgccggttttcacgggctggaaattggccgtgcgcggctgcaaaaaatagccagcgtcattaccccacgttatgaaatcggtaaaacggcgagcgaaatacttattgcgcgcctgaccggtaaagacgcgccggacagcgtgaatctggcctaccagatatattatggcgatacgttatagttatcgatagaatagcgatattccattttattcttatttgttaaagttggttatgatgcttattaatccgcattgagtaaattcctggcgggtggcatgcaaagagcaaaacgtttcgcttgttattcaccggcgtggcgaacttttttaaaaaataatagtggcaaccgacggctaatgtatgacataaatagcagactacggacctcgcataaggataaagtgctgtgaagaatctcattgctgagctactggtaaaactcgcccaaaaggaagaagaatcgaaggagctgacggcccaggttgaggcgctggaagtggtggtgaccgctctgctacgtcatatggagcaggacgcccagcaggcgctcatcatcgatattgagcaggccatcgatgaggccagccccggcccgctggtggatgaccgcgatacccagctactgcagcaatatataaagaagctgttacggcatcctcgtagctagttttgtgacagggtatggatgctgtcattttactgtcacatcgcttttatacagtctccctcgttttgttttttaaagtattttttacacggagacgataaaagtgaaattaagcgccctgtttattgccctgctgcctctgctgggctccccgattattcacgcagaaacaacaaccgcaccggttctggaaaatcgtgccgcgcagggcgatatcaccacgccgggcggcgcgcgtcgtttaagcggtgaccagaccgaggcgctgcgcgcttcgttaatcaataaaccggctaaaaatattattttgctgattggcgacggaatgggcgattctgaaatcaccgccgcgcgaaattatgcagaaggggcgggcggcttctttaaaggcattgacgcgctgccgctgaccggccagtacacccattattctctggataagaaaaccggcaagccggattatgtcaccgactccgccgcttccgcaacggcctggaccaccggcgtgaaaagctataacggcgcgctgggcgtggatatccatgaaaaagatcatcagaccatccttgagctggcgaaagcggcgggcttagctaccggtaacgtctccacggcggaactgcaggacgccactcccgctgcgctggtggcgcatgtgacgtcgcgtaaatgctacggcccgagcgtgaccagcgaaaaatgcgccagcaacgcgctggaaaagggcggtaaaggttcgattaccgaacagctgctgaacgcccgtcccgacgtaacactgggcggcggtgcgaaaaccttcgcggaaagcgcgacggccggtgaatggcagggcaaaacgctgcacgatcaggcggtagcccgcggctaccagatcgtcaccgacgccagctcgctggccgccattagccaggccaatcaggacaaaccgctgctcggtctcttcgcggaaggcaatatgccggtgcgttgggaaggcccaaaggcgtcttatcacggcaatatcgataaggcggcggtgacctgtacgccgaacccgaaacgcgatgcatcggtgccgacgctggcgcagatgaccgaaaaagccatcgatctgctgagcagcaatgagaaggggttcttcctgcaggtggaaggcgcttctatcgataaacaggatcacgcggcgaatccgtgcggtcagattggcgagaccgtcgatctggacgaagcggtacagaaggcgctggaatttgccaaaaaagagggcaataccctggttatcgtcaccgccgaccacgctcacgccagccagattatcccggcagataccaaagcgccgggcctgacgcaggcgctgaacaccaaagatggttcggtgatggtgatgagctacggcaactctgaagaagagtcgatggaacataccggcacccagctgcgtattgccgcctacggcccgcacgcggccaacgtggtgggtttaaccgaccagacggacctgttctacaccatgaaagccgcacttaatctgaaataaccgggcgccggtgatgaattttcgttaccggctggttttttctccatcagcgaccagacttacagagatccactcatagaggatggtgcgatgaaaataacattacttgtgaccttactttttggcctggtatttatgacagcggtgagtgccgcggaaaaagagttgacccctcagcagcaaaagatgagcgtctgcaataaagaagcgtcatcgaagtcgctgaaaggggatgagcgtaaaacgtttatgagtagctgcctgaagaaagatggcgccgcgcaggacggtaaggggctaacgcctcagcagcagaaaatgcgcgagtgtaacgctcaggcgacccagcagtccctgaaaggggacgatcgcagcaaatttatgagcgcctgcctgaaaaaacaggtgtaagaaatgggcgggtgagggaaacctcacccgctattcgctattgcaatcaggaacggctcagcttctctgatttctccatgcatttcaccatcgcttcgatgacggcggaacggaagcctttctcttccagcacgcgcacggcttcgatggtggtgccgccgggcgaacacaccatatccttcagcgtccccggatgctcgccgctttcgagtaccattttggccgagcccatcaccgcctgcgccgcgaatttataagcctgcgcgcggggcattccgccaagcacagcggcgtcggccatcgcttcgataaacataaagacgtaagccggcgcggagccgctgacgccgaccaccggatgaatcatcggctcagcaatgatttccgcctgaccaaagcagcggaatatggtcaggatctccgcggtttcttcggcgctgaccagcgcattcggcgtgaccgacgtcatccccgcgttgaccagcgaaggcgtgttgggcatcgcgcggactattttgcggtcatggcctaaggcgcgcgccagctggtcgagcgtcacgcccgcggcgatagaaaccaccagagagtctttattcaggctggaggcgacgtcgctgagcacttttaccatcacgcccggctttacggcgccaaaaacgatatccgccacctgagccacttcctgcgcgctttgcgccgcattaatgccgtattggtcgtgcagggccgccactttatccggcgacggggtatagacccagatttgacccggctgcacctgcccgctggcgatcaggccgcccaggatggccttgcccatgttgccgcagccgataaagccgattttcttctccatcaccaatcccctttgtttgttttatcgttagcgatatagcttaacatcttgttgctttcgcggaaggcaaaagcaggcgacaatacggcatctctttttcatcgacaggagccgcaatggctatttgggttgatgcggacgcgtgtccgaacgtcattaaagatattttgttccgcgccgccgagcgcgcgcaaatctcgctgacgctggttgctaaccagcctctgcgcgtcccgccgtcgcgctttatccgcacgctgcgcgtggcgcaggggtttgacgtggcggataacgaaatcgtacgtttatgcgagccgggagatctggtgattaccgccgatatcccgctggcggcggaagtgctggagaaaggcggggcggcgctgaatccacgcggtgaacgctacagcgaggcgaccattcgcgaacgcctgacgatgcgcgactttatggaaacgatgcgggccagcggcgtgcagaccggcggcccggatagcttatcccagcgcgatcggcagcagtttgccgccgcgctggagaaatggctgttagacgttaagcgccagcagggttaaacccagctgtcgtcgtcgctgccgaaatcatcattgccgaaaccggcgtcaaagtcggcgtcataatcgttgttgtcggcgaggaactgcccgtcatcctggcggaaggtatcgtcagcgacgctattgtcctgcgcctggctgagatccggctgcggtttctcttcgatgatattgacgatctcttgcggatgcgagccgctaaacatattggtcaacatgtttcccagcaccacgccgcccgcgacgcctgccgccgtttgcagcgcgccggccataaaaccgccgccgctgcgcgacgcctgaggggcgtagttctgctgctgcgcctgcggagcatactgaggctgggcgccggcctgcggtcggccatactgctcggcgccaggaatcgggtcggaaccgcgcgactgaccgccgccaaacaggcctgagagaaacccgccgctgctcggcttcgcggcctgaagctgggtcacctggctctccagcgcctgaatgcggtcgttgagctgtttgatcgccgcttcctgaatcagaatcgtttgcgccatatagtaaggggcgaacggctgctctttaatgtgcccggcaatccgctcctcagcgctggcatcccgtgatgcgctgtggctctcggcctcttttaatcgggaaaacagtccatcgataaggcgttgctcttcagattgcatactacatacctctgtcatactgattgattagcttcagattcgctccgaagcacgcatcttgtaaatatgcggcagcgtaaagctgtgcagaaatgtgttactgtttacgccagactgcgaacaaaaaataacttctgtacaaaagtaaagctggcataacaccaaatgcaatgataagtttacattaaatgtcctttctaatactaaggtgaaagggtttgcagatggtgtgtaacgtttattttacgatttgcgtcgggtaagtttgcggtaccattgtttctcttttcgctttcatttatccgcaaaatgcggaaccaaggggtcttcggtaatgacacagctaatatttcttgtcgggcctcgcggctgcggtaaaacgaccatcggacacgcgctggcgaaagctcgcagctttaagttcgccgacacggaccatgagctgcaggagcatgagcagcgcacggtagcggctatcgtccagcaggaaggctgggaacgctttcgtgcgctggaaacgcaggctttagaacgcgtcgctcaacccgcgacgatcatcgccaccggcggcggcattatcctcagcgaatacaaccgacagtttatgcgggaaaatggcatcgttatctatctcgaggcctcggtttccgcgctgattgaccgccttgaagcctatccgaaggcggaacagcgcccgacgctgaccggaaagcccatccgcgatgaagtgggtgaggtgctggcgcagagggaagcgctgtatcgcgcggccgcgcatcatattattaatgcgaccgccacgccggatgaggtcgtggaacagattatgaccaccgtctgcggcgagacctataccagttaagactttgcctggggtaaacggatcggcagcgcctatactttaaagctcttaaggtaaaaaaaggaaacgctatgccgaccagacctccatatccaagggaagcgcgtgttgtcgccgttgaaaagggcccgcagggccagacggtcacctggtatgaactgcgcgccgatcacccgacgccaaactcactcatcagcgaacatcctacagaacaggaagcgctggacgccaaacggcgttacgaagatcctgataagtcttaattcctcttaaatgtccgggattcgttctgaaaagatcgctaccggacatgtatcacatttttaatctattaacggtactaatgattacctaaggtacggattttcaggagcgtttttgacgcttctggaatctttacattccatatcagccgtaacctgctacgcttctcgacggttgctttgggtcaccagggggcagaagttgtaaataaaagcctgttttgaaacagcggttgtgaaaaggtaaacgatatgagtagtgcatcgatggcaatcttgaccattggggtcgtacccgtggcggagatgctgccgcttttaactgaacatatcagggaagacgagatcgcccacattagcctgctcggcaaaatgacgcgcgaagacgttatgcgggactacagcatagagcccggcgatgagatgctattgaccttgcttaacgataatcaaattgcgcaggtctcacggcagaaggttgagcgtgatttacgtagcgtcattgcgatgctcgataaacaaaattacgaccttattttactcatgagcactcatccctttagcggatttacggcgaataatgcgatcctgcttgagccgcaaagaattattccgccgctggtcgcgtcgattgtcgacggccatcaggtgggggtgattgttccggttgaagagattttgccgctgcagcggaataaatggcaggtattagaaaatactccgttttacgccatttccaatccggtgagcggcggtaaagaggagttaatcgccgcgggcagggagttgattgaacagggcgcagacgtattaatgctggattgcctttgctaccaccagcagcatcgcgacatattacaaaaggcgctggatattccggttctgttgtcaaatgtgctggtttcacggctggcggcagaactattagtttaacctgatataacgcgttaattttacgtgacaggggcaaggagcgccccctatattgtgccttcaacacaagatcataagggcgagtttatgcttcaaagcaatgaatactttgacggaaaagtaaaatctatcggcttcaccagcagcagcaccggtcgtgcgagcgtgggcgtgatggcggaaggggaatatacctttggtaccgcgcagccggaagagatgaccgtagtcagcggcgcgctgaacgtacttctgccgggagaaaccgagtggaaagtctatgccgccggggaagtattcaacgttccggggaatagcgagtttaatctgcaggtggctgagccgacctcttatctgtgccgctacctgtaatgttcgtttccttcctgcgctggcaggaaggaattcacgagattagcgctgcgcttcgccgcctagcccttccaccagattctgaatcagcgcggccagctcgccggtcatcagaataaagtccgcgtcaaaacgctgagcgaaatcttcccgatcgatatcttcattctgatcgcgcagttcgtcgcagaacttcaggcgtttaatcgaaccatcatcgcacattaagaactgaatgcgctgctgccagtcgagcgccagcttggtgacgaccttaccggcttcaatgtgcacggcgatctcgtcgctcaccagatcctgttttttcgcgcggatcacgccgccgtcttccagcatcgctttcagctcggcttcatccagcagctggaagccctgagccacggtaccggaacgcacccactcggtcagcgtcagttcgatcggggtttccagcgccagcggaacaaccggcagcgagcccagagttttacgcagcagcgccagcgtatcttccgcttttttggcgctggcgcagtccaccatgatcaacccgttgacggtatcgatccacatcatggtctggctgaagcggctgaaggcgcgcggcagcagggaatgcagcacttcatccttcagagaatctttttcggtttttttcagcttacggccctgctcggcttccagcttgaagatctttgcttccagcgcctgtttgatcaccggagacggcaggatcttctcttctttacgcgcgcagataacgatctggccatttgccgtatgcgtcagcgcatcgctgtgcgatcccatcggcggtacccaaccggttttggccatatcctggctgccgcaaggagtaaaggtcagctcggccagctgtttttccatctcctcggcgcgcagggaaatgtcgcggctgagacgataaaccattaaatttttgaaccacagcatgataatttccacggcttagtcgttaaatccagcgggcatgatagcgaattgtcgctatgcttgcattgttaatcgggagaggaattcacagtgcgcattggcattgatttaggcggaaccaaaacggaagtcatcgcgctgagcgaccagggagcgcagctatttcgtcatcgcctgcctacgccagggggcgattatcgccagacaatagagacgatagcctcgctggtcgagatggccgagcaggctaccgggcagagcggcacggtcggcatcggcatccccgggtcgatttcgccctataccggcgtggtcaaaaacgctaactcaacctggctcaacggtcagccgtttgataaagaccttagccagcgtctgcaacgggaagtgcgtctggccaacgatgccaactgcctcgcggtgtcggaagcggtagacggcgcggcggccggggcgcaaacggtatttgcggtgattatcggcaccggctgcggttcaggcgtggcgcttaacggacgcgcccatattggcggcaacggtacggcgggcgagtgggggcacaacccgctgccgtggatggatgaagatgaacttcgctatcgcgctgaagtaccgtgctactgcggcaagcagggctgtattgaaacctttatctccggtaccggctttgcgaccgattaccggcggttaagcggtcattcgctaaaaggcagcgagattatgcagcgcgtgggcgagcgggatccggtggcggagctggcgctgagccgctatgagatgcggctggcgaagtcgttggctcacgtggttaacatcctcgatccggacgttattgtgcttggcggcggaatgagcaacgttgaccgtctctaccagacggtgccgaatctgctaaaaccatgggtattcggcggtgaatgcgagacgccgattcgccgggcggcgcacggggactccagcggcgtgcgcggcgcggcctggctgtggccgctgtaatcatcaatccgctgcgcggcctgaacggcgcagcggataccccgcggattaccggtccgggatctcctccaggctgtagtaaatcgacagccccctttttttaccttcctcaatatccaggtccgctccgcgggattcacccggcatgcgcaatatagcgtcgcagcggctaatgacacggtgagcgaccgggtagagatattcttcgctaatcgcatcgccaatttccgttgaacccgcagctttggcgatgggcagagccagccattcgccgaccacggggatatggcctttctggtaaacgcgtagcgcaacctgggccatattgttcaggttagcgtcgataagttccgcgcgattgtgggtgccgctgcgtaccgggccggcaatcaaaataagtaagcttttcatggttaagaccttcttaatgggccagaggggatgggacgatgctgccggaggctgcagcacgccctcagaaaaagttatcaatgcacggttttgcacgaatcgatgtggttaaaataataatcacgatttttatgcattatttcgcctgcttatcatcgttaaagcaatgaaattaaacttatcatgcaaattcgtgcaatatcaagatttatcgtgaattctgagcccgggcaacggcgcgacctctcccgtgggggagaggcttgaagacaggtgcggagggggaaatttattcgacggcgaaagctttatcgagacggctatagcccagcccgttgatttttttaactttaatttgcacaggaatgcgctctttcatcgcctcaacgtggctgatgacgccgataatcttgccgctggcgttgagcgcgtccagcgcatccagcgcggtatccagggtttcgctgtccagagtgccgaagccctcatcgagaaacagcgagtctatccgcgttttatggctcaccagatcggagagcgccagcgccagcgcgaggctcacgaggaagctctcgccgccggacagcgtccgggtgtcgcgcaccgcgtccgcctgccaggtatcgaccacttccagctccagggcgtcgctggctttgcgttgcagcagatagcggccgtgcaggcggttgagctgatggttggccagccacaccaggttatccagcgtcagtccttgcgcaaacttacggaatttatcgccctctctggagccgataagcgcgttcagccatccccagtcttccacttcctgcgcagcgcgttccatctgctggcgtaacgactgctgacgctgctggttttctgcattctgcttcagctgctggcgaatctctccctgacgggcgctgttttcccgcagcagcgtcgtcagctgctgaagctgttcctgtacccgctcaagaggctggctgatatccgtttccgccggaggctgctggcggtggctatccagcgcctcgcgggcccgcatcgccagcgcctgattctgctgtagcgtagtttccagcgtctgcttcaggcgttcaaggcgccggcgcgtctcctcatcgagcagcgcggcgagaaacgcctgctggtcagcgaacgggctggcggccagcgccgcgctgaactgcgcttcgctctctttcaactgagcctgctgccggctctcctgctgccccagggtttgccactggctctgaagcgcgaggcagtcgtcgtgcacctggcgccagccgtccagcggcgcgggttccgccgctaagtccgtttccggcaaggactccagcagcggggtcagctgctgaagctgttcctgcagggcgatcagttcgttctgtttggtctgccagccgcgggtctcgtcttcccgctgcgccagccagcctgcggcctgctctgctgccggtaaactcagcgcaaatgcggccagttcagccgccagcgcggcgctgcgctgcgcttgttcctgctggagctgctggagctgctgctggcactcctgctgctgggcctgccaggccagacgctgctgatgctgatacagccgctgttcatgctcctgctgcgcgtttagccagccgggaatgtcatcctttggcgtcaggtcgatatttaatccggcgatcgtcgcctgccagcgtgaggtaagcgcttgctcctgctgcagaagcgatgctttctcggtggcctctttttgctgctgcttaagcagggcgtccagctcgccgcgcaccagggcgccggcctccgccagctgtttgacttcgcgctcaagcgcatcgcgccgcgcctgatttacgccgggaaccagcgcctgatactcggcgacggccggatgctgcgcggaaccgcagagcggacagggggaaccgggctgcaggcgggctcgctcggcctccaggccggcaatgcgcgcttccatttcgcacagggctttgacatcgctaaactgctgattcttctctttataggcctgacggcgctgggccagggtggtttccagccgctcctgctcctgcttactggcctgcccggcggcatgaagctgggataaacgctggctcagcggctgcagctggccatgcagggccgcgagctgctggcgcagagcgcgcgccgcggcgtgctgcgcgaggccggcgctgacctgctcagcatccagcgccagcccgtcgggcggcagttcgcccagccggcggctggtttccgccagacgctgctgcagagcggcttgctgctgcgtatcgcgggcctgctgctggaaagcggcccgccagcccgccagcgcattgccccatcgctggtagcggtcgtgctcttttagccatgcggcgagcgtttgctggtggttctgcaggcgttcagattgctgccgggcggcgaggcgaatccccgcccgcagccgcagtcgttcatgtaagcgagtatttacttcttctctcagattgtgggtttgcgccagcgcggcgatttgctcctgttgacgcgtccactgcgggcgtagctgctccgcgggctgggcattcagcaatacggtaagctgcggttgcgcctgctccagcgcagcctgcgcttcgcgtagcgcggtttgagcctgccgatcttctgccgtcagctctgcgccgcgtaccagccactgacgggcattttgcaggcgggtttgttcgctaacctgctgtttttcttcatcagtaagcgcttgcaaactttgttggagcgcctgctgctgttcgtcgctcagcagcagcacgccggaggcctgggcctgaattttctccagctcgacgcgggcctgcttatgcttttcaaagacctgtgccgaaatctggccgtaaatctcggtgccggtcagctcctccagcagctcggcgcgctctttcggtttcgcgttcaggaaggcggcgaactgcccctgcgacagcagcatcgagcgggtgaagcggccatagtccaggccggtgagcgaggcggtcagttccagcttatctttgaccttatcggcgaggatcttgccgtcctcgcagcgcgccagctcgacgcgcggaacctgcaggttgccgtccggctggtttcgcgcccggttctggctccagaaggcgcggtaggcgatgccttttacctcaaactccacttccgccaggcattcggcagtgtcgcgggtcatcagatcgttctgcgattgcgacacgctgctcaggcgcggggtttcgtgatacagcgccagacagatagcatccagcagggtggtttttccggcgccggttggcccggtaatcgcgaacagtccgttgctggcgaagggctcagcggtgaaatcaattttccattcgcctttgagtgaattgaggtttttcaggcgtaagctgagtattttcacaggcgatcctcaccgttcaggctatgcagcgtttcattaaagagctgttccaggcgctgctgctgcgtcgcttccagcgtttccagcgccagacggcgggcgaagacgtcctccacctgcagttcgctgagggtctcgcgctgagcgccggccagaatgcgatcgcgctgggcgcggctgcggcgcaccagcagcacttctaccggcagcgtttcggtctgcgcctggattttacgttggatatcatgcatatattcgtcgctggtgacttcgatatccagccacgctgagggctgctggtcgttattctgccattggtttagctgtgcgctaatgctggcgaaatcgcccttcaggaccgccagcggctgggtgacggggacgataagcggcgtgacgtccgtcaggcagccgttagcgaaagtgaccagattgacgctcttatttttcccggtttcgtcaaagctcagcgggatgggcgaaccgctgtagcggatatgttcgcagccgccgaccacctgcgcccggtgaatgtggccgagcgcgatatagtcggcgggcggaaaacggctcgccgggaaggcgtccagcgtaccgatatagatttcgcgaaccgcgtcgcttttgctggcgccgacggtggttaaatggccgctggcgataatcggcagcgcccggtcgccgcgcagttcgcaggccagctggtactgctgctggtagtaatcgctgatggcgctgagcagcagctgctgcttttcgccgccagagtgcccggcctggctggtcaccagctcacgcgggcgcaggaacggtaccggacaaaaaattgcccccggcgtaccgtcgcgcagcggcaggataaaaggggcgtggccggcattggccaccaccgtcgtattcaggaaggcgagaatgtctcgcgactcgttgagggtggcgaccgaatcgtggtttcccgccagcaccaccagccggcagcgggtctgctgcagctgaacgacaaagcggttatacagctcgcgcgcgtagctcggcggtgagccggtatcaaaaatatcgcccgcaacaataatggcatcgacatcatgttcctgcgcgctggccagcagccagtcgagaaacgcctgatgttcggcggcgcgacttttgctgtaaaaattttgtccaaggtgccagtcagaggtgtgaaggatgcgcatagttgttccatagcgaaaaagcgtaagcggcattatatacccgtcatccttcaagttgcttatgcgttggctacgtccagccacctggttacctgtgcttgtggggagtgaaacctgaattattgaggggataacgctgcttttgggtgagttaagtccgtgtcacaattcgaaatccgcgttcatctggcggtcatttttttcataaatctgtcataaatctgacgcataatggccgcgcacttctatactgatggctaaaaaatacagggtaaataatggcgagaagaattctggtcgttgaagatgaagctccaatccgcgaaatggtttgctttgttctggagcaaaacggctttcagcccgtcgaggcggaagattttgacagcgcggtcaatcagctcaatgaaccctggcctgatttgatcctccttgactggatgctgccgggcgggtcgggtctgcagtttattaaacagctcaagcgtgaagcgatgacccgtgatattccggtggtgatgctgaccgcccgcggcgaagaggaagatcgcgtccgcggcctggagaccggcgccgatgactacatcactaagccgttttccccgaaagagctggtggcgcgaattaaagccgtgatgcggcgcatttcgccgatggcggtggaggaggtgattgaaatgcaggggctgagcctcgacccctcttcgcatcgcgtcatgaccggcgaaaatccgctggatatggggcctacggagtttaaattactccacttcttcatgacgcacccggagcgagtctatagccgcgaacagctgctgaatcacgtctggggaaccaacgtttatgtcgaagacagaacggtagacgtgcatattcgccgtctgcgcaaagcgctggaacatagcggccatgaccggatggtacaaacggttcgcggtacgggatatcgtttctccgcccgtttctgaatgctgacaggagtgtgaaccgtgctggaacggctgtcatggaaaaggctggcgcttgagcttttcttgtgttgtatcccggccctgatcctcggggcgtttttaggttatctgccgtggtttttattggcggcagtgaccggtcttcttgtctggcatttctggaatctgatgcgcctgtcgtggtggctgtgggttgatcgcagcatgacgccgccgccgggcagcggcagctgggagccgctgctttacggactgcaccagatgcagatgcgtaataaaaagcgccgccgtgagctgggaagcctgattaagcgctttcgcagcggggcggagtctctgccggatgcggtggtgctgaccaccgaagaaggggtgatgttctggtgcaacggtctggcccagcagatcctgaatctgcgctggcctgacgataacgggcagaacatccttaacctcttgcgctaccctgaatttgccaattatctgaaataccgtgatttttccaaaccgctcaatctggtgctgaataacggccgtcatctggaaattcgcgtgatgccctatagcgataaacagctgctgatggtggcgcgcgatgtcacgcagatgcaccagctggaaggggcgcggcgaaactttttcgccaacgtcagccacgaactgcgcacgccgttgacggtgctgcaggggtatctggagatgatgcaggagcaggtgctggaagggggaacgcgcgaaaaagcgttgcacaccatgcgtgaacaaacccagcgcatggaaggcctggttaagcaactgctgacgctgtcgcgaatcgaagccgcgccggtactggcgatgaacgataaaatcgatgtgccgatgatgctgcgggtggtcgagcgcgaggcgcaaacgctaagccagcagaggcaggtgctgcatttttcggtcgatgaatcgctgaaagtactgggtaatgaagaacagctgcgcagcgccatttccaacctggtctataacgcggtcaaccatacgccgccgggcacggacattaccgtaagctggcagcgcgcgccgcacggagcgttgttcagcgtcgaagataacgggccgggcatcgcgccggaacatattccgcgtctgaccgagcgtttctaccgggtggataaagcgcgttcaaggcagaccggcggcagcggtctggggctggcgatcgtcaaacacgccgtcagccatcacgatagccgcctcgaaattgagagtacgctggggaaaggcacccgctttagcttcctgttgccggaacgtttaattgccaaaaattgagcccgagcggccgggtgtcagaataacttgccaatgaccagcttcggttggtcattttcctttgcagcgcaatcacagctgcgtaattaacgaacgctcgctgcttttttgttcgcatgataagccagatgttttctatccatcaggtaaataattctacgcatcaaaatagagttagcataatcatctgcttttgcgatccctccttgctttaaaacgttataagcgtttaaattgcccccctacggtcgcagacagactgtttttgcgtggtaattcaaaaaacaattcttttccacgccgctttgggagcatatcccgctgagtttactgacaatggccgctgtatcatccccaggggaaaggcgcggtatttatccgtttttacaacaccacatccacaggctgtaatgaatttatgacccatcagttaaaatctcgcgacatcatagcgttgggctttatgaccttcgcgctgtttgtcggcgcaggcaatattatcttccccccaatggttggcttacaggccggcgaacacgtctggagcgcggccattggctttctgattaccgccgtgggtctgccggtgctaacggtcgtggcgctggcaaaagtcggcggcggcgtagagagcctgagcacgccgattggtaaagtcgccggtatcctgctggcggtcgtctgctacctggccgtagggccgctgttcgcgaccccgcgtaccgcgaccgtctcttttgaggtggggattgccccgctgaccggcgacggcccgctgccgctgctgatttacagcgttatctattttgcgctggtgatcctcgtttcgctctacccgggcaagctgctggacaccgtggggaatttcctcgcgccgctgaaaattatcgccctgattattctcgccgtggcggcaatcgtctggcctgccggtcccctgagccacgcgatggaagcctaccgtaccgcgccgttctctaacggcttcgtcaacggctatctgaccatggacaccctcggggcaatggtctttggtatcgtgattgtcaacgccgcgcgttctcgcggggtgagcgaagcccgcctgttgacccgctacaccgtctgggctggcctgatggccggcgtgggcctgacgctgctgtacctggcgctgttccgtttaggttccgatagcggcacgctggtggagcagtccgctaacggcgcggcgattctgcatgcttacgtccagcacaccttcggcggcgcgggaagcttcctgctggcggcgctgatctttatcgcctgtctggtgacggcggtgggcctgacctgcgcctgcgcggagttctttgcccagtacctgccgttctcctaccgtacgctggtgtttatcctcggcctgttttcgatggcggtctccaacctcggcctgagccacctgattcagatttcgattccggtgctgacggctatctatccgccgtgtatcgcactggttgtattaagctttacccgcggttggtggcataattcgtcccgcgtaatcgccccggcaatgtttatcagcctgatgtttggtatcattgacggcattaaagcgtcggcgtttgcagagatgatgccgtcctggaccgcgcgtctgccgctggcggagcagggcctggcctggctgatgccaaccgccgttatggtggtgctggcggttatctgggatcgcgcagcgggacgtcaggtgacatccagcgcgcactaaccgacgctttacacaggtgtttaaccacgggacttcaggtcccgtggttttttgttttttggtcaccctcctttgttctttgcccccgcgaaggccagaggagaaaaacggcatggaacacgatggaaagtagtaacaagcttaagcgcgggctaagtacccggcatattcgctttatggcgctggggtcggcaatcggtaccggccttttctatggttcggctgacgcgattaaaatggcgggtccgagcgttctgttggcttatattatcggcggcgccgcggcctacattatcatgcgcgcgctgggcgagatgtcggtgcataacccggccgccagttcattctcgcgctacgcgcaggattatcttggcccgctggcgggctatatcaccggctggacctactgtttcgaaattctgattgtcgccatcgccgacgtcacggccttcggtatctatatgggcgtctggttcccggcggtaccgcactggatctgggtactcagcgtggtgctgattatctgcgccgtcaacctgatgagcgtgaaggtcttcggcgagctggagttctggttctccttcttcaaagtcgccacgattatcatcatgatcctcgccggtttcggcatcattatctggggtattggcaacggcgggcagccgacgggtatccacaacctctggagcaacggcggcttcttcagcaacggttggctggggatggtgatgtcgctgcagatggtaatgttcgcctacggcgggatcgaaatcatcggtatcaccgccggcgaagcgaaagatccggagaaatccattccgcgcgccattaactcggtgccgatgcgtatcctggtgttttacgtcgggacgctgtttgtgattatgtctatctatccgtggaaccaggtggggaccaacggcagcccgttcgtactgaccttccagcatctcggcatcacttttgccgccagcatcctgaactttgtggtgctgaccgcttcgctgtcggcgattaactccgacgtctttggcgtggggcgtatgctgcacggcatggcggaacagggcagcgcgccgaagatgttcgcgaaaacctcccgtcgcggggtgccgtgggtgacggtgacggtgatgacgattgccctgctgttcgcggtctatcttaactacattatgccggagaacgtcttcctggtgatcgcctcgctggcgaccttcgccaccgtctgggtgtggattatgatcctgctgtcgcagatcgccttccgtcgccgcctgccgccggaagaggcgaaggcgctgaagttcagggtgcctggcggggtcgcgaccacggtgattggcctgctgttcctggtctttattatcggtctgatcggctaccatcctgatacccgcatctcgctgtacgttggctttgcgtggattctcctgctgctgattggctggcagtttaaaacccgccgcgagcgaaaactggcgaaagcctagtcattttcgttctcttcttgccggatacgcacgggctatccggcaagctatccctccacccccgccatcctcccccaataattctgccgatgatgagtcatacgccagtacgctgtggcaaggtgtgcccattctgcaaagagaggaataatgatgttgaaggcatggcacctcccggttgctccgtttattaaggaacagcaggaacgactgattattacgctatggttaagcggcgacgatctgccgccgcgggtcacgctgcgcgcggaagaggataacgaagagctgtcgctgccgatgcaccgcctgcggcaggagccgcatccgggcgtggtggcgtggcgcggggaaatcagcctcgttaacgggcagccgcgtcggcgttacagcttcaagctgctgtgggccgaccgccagctgtggttcacgccgcaggggttcaaccgctttccgccggccaggctggagcagtttgcggtcgatctgccggacagcggaccgcagtgggtagccgatcaggtattttatcaaatcttccctgaccgttttgcccgcagcgagtctcgcgaagcgggacaggatgcgatttattaccatcacgccgccggtcacgacatcgtacgcaaagcgtgggatgaaccgctaaccgccgaggcgggcggctccaccttttacggcggcgatctcgatggtatcagcgagcggctgccgtacctgaagcagcttggcgtaacggcgctgtacctgaacccggtatttgtcgcccccagcgtgcataaatatgataccgaggattatcgtcgcgttgatccgcagtttggcggcgatgcggcgctgctgcgcctgcgccaccatacgcaaaaagagggaatgcgtctgatcctcgatggcgtgttcaaccatagcggcgattcgcatgcctggttcgaccgccaccagcgcggtagcggcggcgcctgccataacgccgattcgccgtggcgcgactggtataatttttcccccgagggcgttgcccacgactggctgggatacgccagcttgcctaagctggactaccggtcgtcgacgctgatcgatgaaatctatggcggggaagatagtatcgtgcgccactggctgaaagcgccatggagcatggacggctggcgcctggacgtggtgcatatgctgggcgaagagggcggggcgcgcaataacctgcgccatatcgccggcattacccaggcggcgaagctggagcggccggacgctttcgtgttcggtgagcatttcggcgacgcgcgccagtggctacaggccgacgttgaagactcggcgatgaactaccgcggctttacctttccgctgtggggctttctcgcgaacaccgatatctcctacgatccgcagaaaatcgatgcgcagacctgtatggcgtggatggataactatcgcgccggactgtcgcaccagcagcagctgcggatgtttaaccagctcgatagccacgataccgcgcgctttaagtctctgctcggcaaagatgttgcccgcctgccgctggcggtggtgtggctatttagctggccgggcgtgccgtgcatttactacggcgatgaagtgggcgtggacggcaataacgatccgttctgccgtaagccgttcccgtgggatccggctttgcaggatggcgctctgctcgaactgtacaagcggatgagcaagctgcgtaaggccaatcaggcgctgcgctacggcggctgtcaggtgatttatgccgaagataacgtggtggtgttcgtgcgcgtctataagcagcagcgcgtgctggtggcgatcaaccgcggcgaagcctgcgaggtggtggtggaggattcgccgctgctcgacgtcaacggctggcagctgaaagagggcgccggggcgctacacgacggcgtgctgacgctaccggcgatctccgccagcgtctggtttagccgctagtcgtaaagctggctcaggctttcactttgcaaaatggcctcgcgccaccagcgctgggccagcccgtcgttgccgctgcgccaggccatataggtgatatctttctcgcggcaggagatgacggccttttcgaccagctcgcctttttccagccacggccgggcaatgtggcgcggtaaaaagccgcagcccagcccggcgcgcaagagttcgactttactggcgaaatcatcgacgcggatttgcggctgctcgtcgagcaggttgctgttgagcggatggcagtagcgggcgctgtcgctgatgaccaccgcgcgatgcaggctgagctgcttgttggtcagcggttgggttgtttccgccagcggatgccccggcgcgatgacgaaaatattgtccatggcgccgagcattttccacgaccattcggcggaggtcggcggttcattgatcgccccgagaataatatccgcgccgttgtgggtgagctcttcccacgagcccgcaagggtatggtgggtaaagttaaggcgggtttgcggatgctgggcgtagaacgcgtcgatcagcggcagcagcgcgctaaacgggaaagagtcatccagggcgattgccagatcccgttcccaaccggcgctgagctgcaccgcctgcttttccagatctttggcggcattcagcagcaatcggcctttctccagcatcattctgcccgtatcggtaaatttcgcccggtgcccggagcgatccaacagagtgatattcagatcgttttccagcttttgaatcatgtagctcagcgcggcaggggttttaaatagcgattctgcggcggtggcaaaagagccatgtttgtccagcgcgtcgagaatcaacaggacatcaaggttcaggcgcatgcgtcagcttccggtaaaaaagagtgcctccgttttaccggagcgccctgttcaattccagtgaataatttagaacggttaaccgtaaaaatttgaaaaacataatttcgcccattttgtaatggttaatcgaatagccatcacttttcgctttggaaataaatcagaaaaaaatctttaataactcgttagaaattactgactatactcaccatgctttatcagtcaggatccagacagcacaacggaaacggtagtatctttttaactcattgattaacaggatatgttatgtctattcgtgaactgatcgatccctcaaactcagcgcttatttttattgaccaccagccgcaaatgtcttttggcgtagccaatattgaccgtcagaccctgaaaaataatacggtggccttagccaaagcgggcaaaatttttaatgttccggtgatttatacctcagtagaaaccaaaagcttcagcggctatatctggccggaactgctggccgtacatcctgatgtgaaacctattgaacgtacctcaatgaattcctgggaagacgcggcttttgttgaagcggtaaaggcgaccggacgcaagaaactgattatttccgcactgtggacggaagtctgcctgactttcccggcgctgatggcgctggatgcgggctatgaagtttacgtggtgaccgatacctctggcggcacctcggttgatgcccacgaacgctccattgaccgtatggtgcaggccggcgcggtgccggtaacctggcagcaggtgctgctggagtaccagcgcgactggtcgcgtaaagagacgtatgacgcggtgatggacctggtgcgcgagcacagcggcgcctacgggatgggcgtggattacgcttataccatggtgcacggcgccccagagcgtaaagcttaaatacacttcatccttcaagctgcctctttgttggcttcgtttgtccgccccggtcactgactcatgtcagctcccggggacgaacaaccttgccgcctcgacgcagcatgaatgattttgtgtattggcctcatccttcaagctgcctctttgttggcttcgtctgcccgccccggtcactgactcatgtcagctcccggggacgaacaaccttgccgcctcgacgcagcatgaatgattttttgtatggtcatgtatagcgaatggcggcggacaacccgccattccctgaagcaaggaactcttaatggcgcaacagaaatcggtgaccctggtgatcagccatgtgctcgacccggagcatggccagcagtatgaagcgtggctgggcaaaattatgccgattgcggcagagtttcccggtcatcttggcgcaaacgtcattcgtccggcccccgggcagaatttatggagcgtgattattcgcttcgacaccattgagcatctttacgcctggacccagtcggagacccgccgccagcttgtggcggaaattgcgccgctgctgagcgaaggcgatcgtaccgaagtccggactgaaccggccttctggtttacgccgcccgcggcgaacgtgcgccagccgcgacgctggaagcaatttttaatcaccctgctggtgattttccccagtactaatctggtgccatcaataaccggaatactgttgccctcgttgaagggaagcctgttgctgcatctgatcaatgatgcctgtgtggtcgcgctggtggtctggttctggatgcccatcgtgacccgtctgtttgctggctggttaaagaaaaactgagccagcctcctgaaggagtgcgttatgtcgcaaactgccacactgatcctgacccacggtcgggttcatactctcgatcgtcaaaatcccctggccgatgcggtggcgatcgctgacggtaaaattctcgccgtcggtagccacgatcggatcatgagctttgccgcggacgggacgcaaattatcgatctcaaaggccatacggcgatccccggcctgaacgactcccacctgcacctgatccgcggcggcctgaactacaatctggagctgcgctgggagggggttccctcgctggcggacgcgctgcggatgctaaaagatcaggccgaccgcacgccgtcgccgcagtgggtgcgggtggtcggcggctggagcgagttccagttcgccgaacggcggatgccgacgctggaggagcttaacgatgcggcgccggatacgccggtatttgtcctgcatctgtacgatcgcgcattgctaaaccgcgcggcgctgaaggcggtgggctacaccaaagagaccccggatccggcgggcggcgagatcgttcgcgacggtaacggcaacccgaccgggatgctgatcgccaaacccaatgcgatgatcctctactcgacgctggccaaagggccgaagctgccgctggaacttcaggtcaactcaacgcggcagtttatgcgcgagctcaatcgtctggggctgaccagcgctattgatgccgggggcggttttcagaactacccggaagattatgaaattattgaacagctgcacgccaaagagcagatgaccgtacgtatcgcctataacctgtttacccagcggcctaagcaggagctggaagattttgagcgctggaccgatatgctcaagccgggacagggcaccgatttttaccgcgccaacggcgccggggagatgctggttttctcggcggcggatttcgaagacttcctccagccgcgtccggatctgccggaagggatggaagatgagctggagcgggtggtgcgccatctggttgaacaccgctggccgttccgcctgcacgccacctatgatgaatccatcagccggatgctcgacgtcttcgagaaggtgaatcgcgatattccgttcaacgggctgcactggttcttcgatcatgcggaaaccatcaccgagcgcaatatcgaacgcgttaaagcgctgggcggcggcattgccgtacagcaccgtatggctttccagggcgaatattttgtcgaccgctacggtaaagacgcggtcaaacatacgccgccggtcgcgaaaatgctcgaactggaggttccggtgggtctggggacggatgccacccgcgtggcgagctacaatccgtggaccgcgctttactggctggtatcagggcgtaccgtcggcgggatggcgatgtacgacgacagcaaccgcctgccgcgcgacgtggcgctggagctgtggacggcgggaagcgcgtggttttccagcgagcagggcaagaaagggcgcattgagcaaggccagcttgccgacctggtggtgctgtcgaaagactacttcagcgtcgcggaagaggaaatcaaggggatcgagtcggtgctgacggtggtggacggcaaggtggtgtacgcggcgggacacttttcgccgctggcgccgccgcctattccggtgctgcccgagtggtcgccggtggtgaaagttccgggccattaccgttccgcgccgccgacggccgcgaatatcggcgcgatagttcagatgcaccagtgctgcggcagctgcggcgtacatgggcatcagcatgatattgcgcgcaaatcggcgattccggttgccgatgagcaggcgttctggggcgtactcggctgctcctgctttgctttttagcgcgacgggcgcttattagtaccggtaggccaatgagagcatcaacgccctcattggcctttttcattttctcggatagcgctgataagacaatgtgtgtcattctgctccctcttcaaacagtgaaggtgagaacatggatgatctactgatctttggcgctgtgattttattctgcgggctggtggttgggccgctcgtggcgattgccgcgctcaggcgcagcgcggcggtccgtgtggaactggcggctttgcagcgtcgggttgaggagcttgagctgcgcggcgttgcgcaggcaccggtggcggagacaagtggcgtcgtgccgactgctccggaagtcgttgcttctgttgacgcaacagcgctggtagaacatgagtcatcaccggcgcccgtggcggaagccgttgacccatggctttcgcagccgaagccaacgccgaagccggagcagatggcgaaatcggctcctgaaaccgaacaaccttccgcgtttggcgggatggtatcgtcattggttcgttggtttatgcagggtaacccgctggcgaagctcgggatcctgctgctgtttcttggcctctcctttctgctgcgctataccgtggaacacgctcttttccccctcgagttgcgtctggtcgcggcgtcgttgttcgccattgtcctgctggctgtcggatggcgattgcggcataagcaaccgatgtacgccctgatcttgcagggtggggcaacgggggcgctctatctcaccgtttttggcgcctttcgcctgtggcagatgctgccgatgaccctggcgtttgcgctgctggtggtgatttgcgcggcgagcgtagggctggcgattgtgcaaaaagcgctcagcctggccatgctggcgagtcttggcggttatcttgcgccgctgctgctctctaccggcggcggcagtcatgtggcgttgttctcattctatcttctgctgtcggtgggcattcttgccatcagcatccgccagcactggcgggagcttaatctgcttggcctgctgtttacctttggcgtcggtggcctgtgggggctgaatgaatatcggccagagtattacctgagctgccagctgttcttaatcgccaatacgattatttttggcgtgttaagcgtggcgctgtcgctgcgggcgcaggaaaagggtaagcagattattgacggcgttctgctgtttgcaccgccgctggtcggctttggtatgcagtacgctatcacccggcatatggaatacggtccggcgctcagcgcgctgggctacggtggcttctatctggctttagcctggctggcactgcgtcgctacccctctttagggaagccgctggtactggccgcgctggcgctcggcggcgcatttaccacccttgctattccccttgcgctttcggctcgctggaccgcgatggcctggtcgctggaggggctcgggatcctctggctgggcgtgcaacagcagcagcggcgtatgagctatagtgggactgcgctactctttttggcggttggcagcgcgctctgggcgcaggcaaatgacgccacgccgctttctttgctgctgattttcgctgtactcagtcttagctggctggtcgccgcctggctgtggcgaagcattgaagtgcacgccagtggaggactgcttttgggcgggctactgttctgggtggtggcgcttgtcggcgcatcgcagctggcgttgagtaaagactcgcagattatatttggcgtgctggcgacgctggccgcgtcggtatggtgctggcgcgcggtcgctgcgcgtttagtctggcaagagctggatgccagcaaatggttgttgtggccaatgatgctgatagtgctgttttatcagctatcccaacggcagattttcgctgctggctggcaaaatctggcctggtgcgcggcgctgcccgcggcggtggcgctgctctggcgtgatgggccttcgctcccgccgcgcataaacaggctcgcccacctgtcgctgttctggatggtgttgctggcgctggcgatggagctgttttggtttacccgggatttgccgtggggcatgtcggcctgggcgagtggattaatgatggcggcaggcggggggctgatcttccttgtctctgaagccgttcatcggcaaatatggccattccgggtatggcctgggctgtatgcctctcaggccatgataccggtggcggttgcgctgggatgcctgctaacgctgacgaacgtgcaggatggtacggtctacggtcagacctatttgccgttgattaacccgctggaagagggcgccgcttttgcgctgcttgggctgacgatattttatcgcgtttcgcggcgttattttccgctgcagctatcggtatgccgcccctggcccgcggttgcgctgctggcgctcggcttctggtggctgaatggcctgctgctgcgcgccctggcctggtacggcgaggtggcctggaatatagaggcgctgtggcattcgcgcttaattcagaccactttcgctctggtctggacgctggcggcgctggcggtcatgctgcgtgcgacgcggcgacactcccgccgcgaatggctgtgcggcgcggcgttgttaggcgttgtcattgtgaaactcatgctggtggacagcgcgcgcggcggcgggctggcgcgcgctgtcgcgtttatcggcgtggctattttggtgctgatcgtcgggtatttttccccgttaccgcccaaagcaggagaagaaaaatgaaatggatgaaagcggtgttatgctgcgtgctgctgggcgtgacgggcgcggctgtcagcggcgatgaagcgcgagaaaaaccactggactatatgcaggggatgatgctggaaaccaccggcgcgtcgccctggtatcgcgtcgagctttccccgctgctctatcaggggacggcgtggcctgacctgcgcgatgtgcgggtatttaaccatcagggagagaccgtaccgttcgcgctgcaggtgcagaaggcgcagcccgttacgcctgaagcgatgacgctgcggcttttccctctggagatgtcgccggttccgccgcgcgaagaggggcgacgcggcggagaatcgctggtcctgcgttcaacaacggggatcgaaattcatctggaaaccgatgatgcgaaggcgctcgggcagagctacttactgacgctaccggcggagaaaacggacgcgtttgcgctggctcagctgcggctgaactgggcggcgctggcgggcagctggcaggggaaagcgtcggtctattccagtcgggatttgaagtactggcgccctgtccaggaggatgcgccccttatggatctggcgcgcgatagcgatcgtttgaaaatggataccataagcgctgacctgacgctctccgcggacgggaatcgttacctgctggtgctcctcgattcgcaaagcaaggcggtcgtgttaaatagcgtgacggccctggccgaacgcagagagcccgagtctacgcgcattgagcttgatgcgcaggcgaacaagatttcagatgaggaagccgtttggcgctgggcccggcctcagccgctgacttcgctcaggatatcgatggccagcgaaggggttctgccggtcgcgctctcctggcgcagcggcgaaaaagaagcctggcagccgctgaccaaaaccgtgctgtatcgactggacggcaagcgttcggaggatattcaactttcagcccagccggttgaagcggtgcggatcacaacgattaacgcccgattaccgacgtcgctgcccgcgataagcggtgcgcgagacaaataccagctgatttttaatacccagggaaaagggccttatatgctggcctggggcaaccgggcggcgccaaaggcagatgtcgccatggacatgctgataccggcgtcgctgcgcaaaacgcaggctgtaagcgatctaccgctggccgtcgcgcaggagagcgtcaccctcggcggtgaagcgcggttgacggcgacgtcggctaccgagcagcaaagcggctggaaaacgctgctggtatggggagcgctaatagtgggcgtcctggtgctggcgctgatggcgtggcgaatctggcgcgaagtgaaaaaaagcggctccgtataaaacaaaaaaggctcgcatctgcgagccttttgccgaacgtacgccgattacaggctggatacgttctcggtcaggtatttagcgacgccttccggagaagcggccataccttcttttcctttttcccactgcgccggacaaacttcgccgtgctcttcgtggaactgcagcgcgtcaaccatacgcagcatttcgtcgatgttacggcccagcggcaggtcgttaaccacctggtgacgaacaacgccgttggcgtcgatcaggaaggaaccacgcagggcaacgccttcgtccgggtgctcaataccgtacgctttctggatttcgcgtttgatgtcagcaaccatggcgtatttaaccgggccgatgccgccctggtctaccggggtgttacgccacgcgttgtggacgaactcggagtcaaaagaaacgccaaccacttctacgccgcgtttctggaattcttcgtagcgcttatcgaacgcgatcagttcagacgggcaaacgaaggtgaagtccatcggccagaagaacagaacggtggctttaccgctggtgtgctgtttgaagttgaatttctcaacgatttcgccgttacctaaaaccgctgccgcggtgaagtccggagcctgacgagtaaccagaaccatatgattctcctgttaatactaaggttaattggaacgcaacgcgggcaagtatagggagaggcgccggcgaactcaacgcgacgctgacaatcgatgagataggttttgcctatcaatcgttatttgaaacggctattcagaatagtcttttgccaaaaaagcgcaatcttttacagttcaccttttttcgcctgcgccatcatctgcgggtagaagcgccagaactgctgctcaagacgatcgtaatgggtatccagatcctgccaggagtcgcgcagggcgtccagccgcggacggcggctggccataccgttcagaacccgctgaataaacgccatatcccgatagcgttcaagccagcgctctgaccacaggtattcgttgagattgacaaaacgcggcggggaatcgggcaaaataaacgagacctgggcgtgggcgtagcggacaaactccggcagcggcagctcgggcgacagctgcgtccagtggcgtgataagaaatggtcccacatcacatccagcgtaattggcgcgacccggcgcgtttcgggacgaaaccaccctttggcttcggtgacttcgggcaggttatccgtcagtacatcgatccggcggtgcataaaaatgccctccacgacgtcagcgggccactcgccggcggggtcgccgcgaacgaaatcggccagtaaattaccggaaagggagctgtcagcgagatgggcgaggtgcaggtgtgcgagaaaattcatgcgattcgttatccggatacggctagttgttgcagcgaagaggtgtgagcactagactaagccgcctgtttttaagtcatgagtatatgccatgcgcgtcgccgatttctcctttgaattacccgaatccctgattgcccactatcccatgcccgagcgcagcagctgccgcttgctgtcattagacgggccgacgggcgcgctgacgcacggtactttcaccgatttactcgacaagctcaaccctggcgatctgctggtttttaataatacccgcgtgatcccggcccgcctgtttggccgtaaagccagcggcggcaagattgaggtgctggtcgagcgcatgctcgatgataaacgtattctggcacatattcgcgcgtctaaagcgccgaaaccgggcgcggcgctgctgctcggcgacgatgaaagcattaaagcgaccatggttgcgcgccacgacgcgctgtttgaagttgagttcgacgacgcgcgcagcgtgctggacattctcaacgctatcggccatatgccgctgccgccgtacatcgatcgtcctgacgaagacgccgaccgcgagctgtatcagaccgtatacagcgaaaaaccgggcgccgttgcggcgccaaccgccggcctgcactttgaccagccgatgctggcgaagcttcgcgaaaagggcgttgagatggcgttcgtcacgctgcacgtgggggcaggaaccttccagccggtacgcgtagacagcattgaagagcatattatgcactctgaatatgcggaagtgccgcaggaggtggtcgatgcggtgctggcggcaaaagcgcgcggcagccgggtgattgcggtgggcacgacctcggtgcgttcgctggaaagcgcggcgcagacggcgaaaaacgacctgattgagcctttcttcggcgatacgcagattttcatctacccgggctatcagtacaaagtcattgatgcgctggtgaccaacttccatctgcctgaatccacgctgattatgctggtttccgcatttgccggctatcagcacaccatgaacgcctataaggctgcggtagaacaaaaatatcgcttttttagctacggggacgcgatgtttatcacgtacaatccgcaggctatttttgagcgcccataagaaggctgtcgcgctggttattttgacgccttcaggaatttattagctatggaatcattccgtagcgagtcgttaaacgtcagactgtttttctgacgcgggagtgataatgaaatttgagttagataccaccgatggtcgcgcgcgccgcggccgtcttgtgtttgagcgcggcgtcgttgaaacgccagcctttatgccggttggcacctatggcaccgtgaaagggatgacgccggaagaagttgaagcgaccggcgcgcaaatcatcctcggcaacaccttccatctgtggctgcgtcctggtcaggagatcatgaagctgcacggcgatctgcacgactttatgcagtggaaaggaccgatcctcaccgactccggcggcttccaggtcttcagcctcggcgatattcgcaaaatcaccgagcagggcgtgcacttccgcaacccgatcaacggcgatccgattttcctcgatccggaaaaatccatggagattcagtacgatctcggttccgatatcgtgatgatcttcgacgaatgtacgccgtatccggcggactgggattacgctaagcgctcaatggaaatgtccctgcgctgggcgaagcgcagccgcgatcggtttgacggtctgggcaacaaaaacgcgctgtttggcatcattcagggcagcgtttacgaagatttacgtgatatctctgttaaaggtctggtagagattggctttgatggctacgctgtcggcggtttggctgtcggcgagccgaaggaagatatgcaccgtattctggagcacgtctgcccgcagatcccggccgacaagccgcgatacctgatgggcgtcggtaagccggaagatctggttgaaggggtgcgtcgcgggatcgatatgttcgactgcgtcatgccgacgcgcaatgcgcgcaacggccacctgttcgtcaccgacggcgtggtgaaaatccgtaacgcgaagcacaagagcgatacttcgccgctggatgcagaatgtgattgctacacctgtcgcaactattcacgcgcttacttgcatcatcttgaccgttgcaacgaaatattgggcgcgcgactcaataccattcataacctgcgatactatcagcgcttaatggctggtttacgcaaggctattgaagagggtaaattagagagcttcgtgaccgatttttaccaacgtcagggtcgaaccgttccacctttgaacgttgactaattttaataatgagggaatttcaatgagcttttttatttctgatgcggtagcagcaaccggtggcgcggcgcagggcagcccgatgtctctgatcctgatgctggtggtgtttggtctgattttttacttcatgatcctgcgcccacagcagaaacgcaccaaggaacataaaaacctgatgaactccattgccaaaggcgatgaagtactgaccaacggtggcctggttgggcgcgtcactaaagtcgcggaaagcggctacatcgctatcgcgctgaacgataccactgaagtggttatcaaacgtgacttcgtagctgccgttctgccgaaaggcaccatgaaggcgctgtaattacccattttccctaagggaactgccgtgttaaaccgttatcctttgtggaagtacgtcatgctggtcgtcgtcattgtcgtcggcttagtgtatgcgcttcccaacctgtatggtgaggatccggccgttcaaatcactggcgcgcgcggcgtcgccgccagtgagcaaacgctgatccaggtccagaaaacactacaagaagaaaaaattaccgcgaagtctgtggcactggaagagggcgcaattcttgcgcgcttcgacaccactgatatccagctgcgcgcgcgcgaagcgctgatgggcgtactgggtgacaaatacgtcgtggcgcttaaccttgctccggcaaccccgcgctggctggcggccctgtatgccgagccgatgaagctgggtcttgatctgcgcggcggcgtgcacttcctgatggaagtcgacatggacaccgcgctgggcaaactgcaggaacaaaatatcgacagcctgcgcagcgagctgcgtgataaaggcattccttacgcgaccgtgcgtaaagaagacaactatggcctgagcatcgctttccgcgacagcgccgcgcgcgaccaggctatctcataccttagccctcgtcaccgcgatctggttatctcctctcagggcagcactggcctgaaagccgtgatgaccgacgaccgtctgaaagaagcccgcgaatatgccgttcagcagaacatcaatatcctgcgtaaccgtgtaaaccagctgggcgttgccgaacctctggttcagcgtcagggcgccgaccgtattgtggttgaactgccgggtatccaggacaccgcgcgtgcgaaagagatcctcggcgcgaccgcgaccctggaattccgtctggttaacactaacgttgatagcgccgcggcggccgccggtcgcgttccgggcgactcggaagttaaatatacccgcgaaggccagccggttgtgctgtacaagcgcgtcatcctcaccggtgaccacatcaccgactcgacgtcgagcatggatgagtacaaccaggcgcaggttaacatctccctggatagcgctggcggcaacatcatgtctaacttcaccaaggacaacatcggtaaaccgatggcgaccctgtttgtggagtacaaagacagcgggaagaaagatgccagcgggcgcgcgattctggcgaaagaggaagaggtgattaacatcgccaacatccagtctcgtctgggtaacagcttccgtattaccggcatcagcaacccgaccgaagcgcgccagctctccctgctgctgcgtgcaggcgcgctgattgcgccgattcagattgttgaagaacggaccatcggtccaaccctcggtatgcagaacatcaagcagggcctggaagcgtgtctggccggtctggtggtctctatcctgtttatgatcttcttctacaagaagttcggcctgattgcgacctctgcgctggtggctaacctggtgctgattgtcggcattatgtccctgattccgggggcgacgctgaccatgccggggattgcggggatcgtgttaacccttgcggtggcggtcgatgcgaacgttctgattaacgaacgtattaaagaagagctgagcaacgggcgctccgtgcagcaggcgattgacgaaggttatcgcggcgcgttcagctccatctttgatgccaacattacgacgcttatcaaagtcattatcctgtacgcggtcggtaccggtgccattaaagggtttgcgattaccaccggtatcggtattgcgacctcaatgtttaccgctatcgtcggcacccgtgccatcgtgaacctgctgtacggcggcaagcgcgttaaaaagctgtctatctgaggagtgcgttgtggcacaggaatatactgttgaacaattgaaccacggccgtaaagtctgggactttatgcgctgggactactgggctttcggcatttcaggttttctgctgattttgtccatcgctattattggcgtgcgcgggtttaactggggtctggatttcaccggcggtacggtgattgagatcaccctcgaaaaacctgtcgatatggaccaggtgcgtcagtcgctgcagaaggcgggctttgaagagccgcagctgcaaaacttcggcagcagccgcgacatcatggtgcgtatgccgccggtgcatgacgccaacggcagccaggagctgggcagcaaggtcgttagcgtgattaacgactcgaccagccagaacgcgacggtcaaacgtattgagtttgtggggccgagcgttggcgcggaccttgcgcagaccggcgcgctggcgctgatagccgcgctggtgtgtatcctgatctacgtcggcttccgctttgagtggcgtctggcggcaggggtggttatcgcgctggcgcacgacgtggtgatcaccatgggcgtgctgtcgctactgcatatcgagatcgacctgaccattgtggcctcgttgatgtcggttatcggctactcgctgaacgacagtatcgtggtatccgaccgtattcgtgaaaacttccgcaagattcgccgcggtacgccgtacgaaatctttaacgtgtcgttgacgcaaacgctgcaccgtaccttgatcacctccggaacgaccttgatggttatcctgatgctgtacctcttcggcggtccgattctggaaggcttctcgctgaccatgctgatcggtgtctccatcggtacggcttcttctatctacgtcgcgtccgcgctggcgctgaagctgggcatgaagcgcgagcacatgctgcagcagaaagtcgagaaagaaggggcggatcagccgtcaattctgccgtaaggcaatcgcgtagcgataaaacgaatcccggtcgcaaggccgggatttttttattacagccgcccggattttggttactctcccgtatcagcacgcaatgacatggagaaatgccgatggctgtcgtaacgctttccaccgttcctcaacccccgctctggcacgatgtgccttccgttacgcttaacgacgacacgctgcggctgcgcaagtccagggtgctggcaaatatgcgtcagtccggcgtagacacgcttattgtctatgccgacaaagagcacggcggcaactttgagtatctcaccggctttattccccgtttcgaagaggcgctgctggtgctgcatcgggacggcgaggcggtgctggtgctgggtaacgagaatctcaagctggcaggccatgcccggctggaaaaccgtgtgattcacgccccgtggttttcgctgcccaatcagccgatggaaaccggtaaaacgctggctcagcggcttcaggaggcgggcgttgcggcggaaaaacgaattggcctggcgggctggaagctctttaccggcgcggcggatgaccgcgcgcagatgttcgatctgcctgcttttatcgtggatgctattcgccaggccgccggcccgcaggcaagattaactaacgccaccggcatttttatcgacccggcaagcggagcgcgagtcaccaataatgccaacgagctggcgcactatgagtacggcgcaaatctggcttccaccgcgattctcaccgcgcttaacgccgttgcgccgggtaaaacggaaaagcaaatcggcgcgctgctggcggcggaagggcagcctaatagcgtggtgatgattgccgctaccggcgagcgcttcgcctgggcgaatctctatccgggcgataaggtgattcagcgcggagataaattctcgctgaccaccggcttcaaaggcggcctgagcagccgcgccgcctacgtggtggccgatgagagcgaactggcgcccgaggtggctgattatctcgaggtcgtggcgaagccctatttcaacgcggtggtgaactggctggaaaatctgcgcatcggcatgcgcggcggcgatatgtatacgctgatagagcaggcgttgccgaaggcggaatatcactggcacctgaatccggggcatctggtcgcggatgaggagtggctctgttcgcccattggcccccattcaaccgcctgcctgcaaagcgggatgatactgcaaatcgacatcattccttcccgcccgggctacggcggcgcaagcattgaagataccgtggcgcttgccgatagcgcgttgcgtcgggagctggcgcagcgctatcccgaactctggcagcgtatcgtcgcccggcgcttgtatatcggcgagcagcttggcattgtgcttcctgaagaggtgctgccattttccagtaccgtgggatacctgcgtccgtggctgctgagtcccgagcgcgcgctggtgtgcgcaccatactgacacaatgctgtcagtaggcctgtcttacactcctcctgaacccaaacaatggacaggaggatgtatgaacaacgtaattaactggtttgagatcccggttgcggagatggatcgtgccgtggcgttttacgagccggtgatgcaggtgacgctgcgtcgggaaaaaatggattgcatcgagatggccgttttcccgcatgaggatccggctcccggcggcgcgctggcaaagttcgatggcgttaagccctccgatcagggatgtattatctatctgcatactgacaatctggcggccacgctcgatcgcgtcaactcggcgggcggaagctgcgtgtttggcccccttgagctggcggacgatatcggcacgattgccctttttattgatagcgagggtaatcggattggccttcaccaacccgcgtaaatgagacaacagaaatgagccgacgcgccgaccgcctttttcaaatcgtccagatcctgcgcgggaggagattaaccaccgccgggctgctggccgagcggctcggcgtgtcagagcgcaccatctaccgcgacattcgcgacctctcgctctccggcgtcccggttgagggggaagcagggagcggctaccggctgctggcgggctatgacctaccgccgctgatgctgacaactcaggaatcggaagcgctgatggccgctatacggctgctgcaaacctggggcggcgcctcgctgtcccaggcgctggagtcggcgcaggaaaaagtgctggccattttgcctgccgagagccggcgtaaggcggagcagtcgcgcgtgttcgcaccggactttggtgcacagggctatagtaaagatcagtttgatatagtgcatcgggcagtctccgcccagcaggcgctggggctgcgctatcgcgatgaagcgggaaacgtgtcgcagcgtgacgtactgccgctggggctttttttctggggcgagcgctggctgctggtgacctggtgcgaactgcgggaagattatcgctgttttcgcctcgaccgctgtctggagatttccgccaccgggcgtcatttcagcgaacgagccgatcgctcattgagtgatttcttgcgtaaggtgagatgcgaagagcgttagcttttatgatccccggcgtagttgccggggatcatcgagccgattagaagttgtagccgaccacgaagtaaccaccccagccggtagagcggacgttaaagtcgccgtcgccgaagttcagcttcgcgtcatccgcccactggccgccgttgtggaagtaacgcgccacgacggagtagtgccagtgatcgtagttcagcgccaggatatggctggacgcgatggagttgctggtgcgtgaatgcttaccgttcaaatcataagcgttgtcatcgcccagatcggagccccagtcaaagttggtgaagccgatatagctcagtgaaccgccccacaggtcggtcagcggcacgaagtatttcactttgaagcggtagccgtcccactcgttctcgtttgatgcgccatagttttgccactgatatttcgcatagacgttgagcgagaggctcatcggcaggccggtatcgatatcggtacccagacccatataccaggtgctctgacgaccggacttgttgcggcccatgtcgtagatatagttgttagcgaaataccactctttgaacgggccgaagctgaggtcggtaccggtcagtttgtcgatggagaagcgcggctcaatttccataaacagcggagaaccgtggttccagatacccttcgcgttggtgttaccaccgaagaataccggcgcatccatatagccatagaaatcaaaccagtctttcttggcgaacgcttcatattccagataagtatcgttacggatctgcggcccaaaacgagtgtggtagctacccaccacgtttacactctggtgccaccaatcagacaggtattgcggtttgtcgttttctgccgcgctggcagagaaagatgcggagagcgccagagctgcgccggctgccagtaatgtttttttcataatgatgccactgtttaaattaagcctgaaggcgttaaaagaagcgccgaagcgtttctaaatatttcgtatttctgtggcgtctattataggaatcattgctcacaaaaatatgtgttgtttcacataacgaacatatgcgtaatcgattgcgttcacgattttatgcatttcttgcgggaatgccaccgaaattcataaattctggcaatttttagtgaactgaatggaaaatctgtaagtggattagcatgaggggaggggagccggatgttcagggcatccggctgagggcgttacggcgtgtttgcgggctggatatcgtggatgcggacaaagccaacctgctcgggcgttacgccattcaggcgtagcggaatatcgacgtcgctcggcgccagaacgcttgccggcgcgctaatcagctgattttgtacgttaacttcctgatagctatcggtggtgccgctgatctgcccggaggcgaccgtcgcgctaaaggccggcagcggatcgtttgattcaccctggatacgcagggtcaggcgggtaccgtcgccatccggcgcgatattgagcagcgacatgcgcagcgtaccaatctgacttttgagacgggccggcgttttcgcctccggcagcaggtatacgccgctgctcgatttcgcattcagcacgttttgctgggtaattttgaccgtttgctggttgagctgggtcatctctttgctcagcgtgctcacgctctggttcatctggcggatttcgctttgctgcgcgcaggcgctgagggtgaaaatgctacccacgatggccagctttaaataacgtcttgtcatagttgggattccgttaacagaggatgcttaatggtagaccgatcggataatcgcactatagatcctttgtctcaaaagctctttctttgttgtcgggtcacttcgcggtaaactacccgttagtttaactacatgtcaggacgcgccatgcattgccctttctgtttcgccgtagataccaaagttatcgactctcgtctggtgggcgagggctcttccgtgcgtcgtcgtcgtcagtgtctggtctgtaatgaacgttttacgacgtttgaagtggcggaactggtgatgccgcgagtcgtaaaaagcaacgacgtgcgcgagccttttaatgaggacaaactgcgcagcggtatgctgaaagcgctggagaagcgcccggtcagctcagacgatgtcgaaatggcggttaaccatataaaaacccacctgcgcgggaccggcgagcgggaagtgccgagcaaaatgatcggcaacctggtgatggagcagctgaagaagctcgataaagtcgcctacatccgctttgcttccgtctatcgcagcttcgaagatatcaaagagtttggcgaagagatcgcccgcttacaggactgagcccatgcaggatgaaatatacatggcgcgagcgctgaagctggccgcgcgcggacgcttcaccacgcacccaaacccgaatgtcggctgcgtgatcgttaaagatggccagatcgtcggcgaaggttttcactatcgcgccggtgaaccgcacgcggaagtgcacgcgctgcgcatggcgggcgaaaaagcgaaaggtgcgacggcgtacgtcacgctggagccttgtagccatcacgggcgcacgccgccgtgctgcgaggcgctgattgccgcaggggtgacccgcgtggttgcggcgatgcaggacccgaacccgcaggtcgcgggtcgcggtttgtaccgtttgcagaaggaaggggtcgacgtcagtcacgggctgatgatgaacgaagccgaggcgctgaataaaggttttcttaagcggatgcgcaccggttttccctggattcagttaaaaatgggcgcatcgctggatgggcgcacggcgatggccagcggagagagccagtggatcacctcaccgcaggcgcggcgcgatgtgcagcgcctgcgcgcgcaaagccacgccatcctgaccagcagcgcgacggtgctggcggatgacccggcgctaaccgtacgctgggacgagctcaacgccgacactcaggcgctgtacccgcaggaaaacctgcgtcagcctttgcgcatcgttatcgatagtcagaatcgcgtcacgccgcagcatcgtatcgtggagcaggcgggtgaaacgctgtttgcccgtacccgtgcagatgaacgccagtggccggagaacgtacgcacgctgctggtgccggagcataacggtcgcctggatctggtggtcctgatgatgctgctgggcaaacagcaaattaactcgatctgggtggaagcaggccccacccttgccggcgcgctgctggaggccgggctggtggacgagcttatcgtctatattgcgcctaaactgttaggcagcgatgcgcgcggattatgtgtactgccggggcttgagaaacttgagcaagcaccccatttcaaattcaatgagatacgtcatgtaggcccggatatttgcctgcatttagtgaacgcttgatttccccggacaaaagggaaagcagtgcgccgattattatgatagaatccgccccccttgcggggccaaatgaactgaacccgaaggaagagtatgaacattattgaagctaacgttgctaccccggacgctcgcgtcgccatcaccatcgcgcgtttcaacaactttatcaacgacagcctgctggatggcgcgattgacgccctgaagcgtattggccaggtcaaagatgaaaacattaccgtggtttgggttccaggcgcgtatgagctgccgctggcggctgatgcactggcgaaaaccggtaagtatgacgcagtgatcgcgctgggtaccgttatccgtggcggcaccgcgcactttgaatatgtggctggcggtgcaagcaatggcctggcgcacgtcgctcaggacagcggaatcccggtagccttcggtgttctgaccacagaaagtattgaacaagccatcgaacgcgctggcaccaaagccggtaacaaaggcgctgaagccgcgttgaccgcgctggaaatgattaacgtattgaaagccatcaaggcctgatttttgtaaggggaattccgtgaaacctgctgctcgtcgccgcgcccgtgagtgtgctgtccaggcgctttactcctggcagttgtccaaaaacgacatcgctgatgtcgaataccagttcctggcggaacaggatgtgaaagatgtagacgttctgtatttccgcgaactgctgtccggagtggcgactaacagcgcgtatctcgacggcctgatgaagccgtatctttctcgtctgctggacgagctgggtcaggtggaaaaagcggtgctgcgtatcgcactgtttgagctgtcaaagcgtagcgatgtaccgtacaaagttgcgattaacgaagccatcgaactggcgaaaacctttggcgctgaagatagccataagtttgtcaacggcgtgctggacaaagctgccccggtaattcgtcccaacaaaaagtaaattccagggccggtttttgcagagtctcacttctgcaaaccggccttattcttttctttttctgaggcataacgtatggcatgcggcgaattttccctgattgcccgttattttgatcgcgtaaaaagcgcacgtcttgatgttgaaaccggcattggcgacgactgcgcgctcctgaacatccccgagaaaaaaacgctggcaatcagcaccgacaccctggtggcgggaaaccattttttacccgatattgaccctgccgacctcgcctataaagcgctggcggtcaacctgagcgacctggcggcaatgggcgctgaaccggcgtggctaaccctggccctgaccctgccggaagcggacgaagcctggcttgaggcctttagcgacagcctgttcgtgcagcttaattattacgatatgcagctcattggcggcgataccacgcgcggaccgctgtcgatgacgctgggtattcacggctatgtgccgacgggacgcgctttgaagcgctccggggcaaagcatggcgactggatttacgtcaccggcacgccgggagacagcgccgcgggtctggcgattttgcaggatcggctgcaggttgaagatgacgccgacgcggattatctcctggcgcgccatctgcgtccgctgccgcgggttctgcaggggcaggcgctgcgcgatttggcgaacgccgccatcgatctctccgacggcctgatttctgacctggggcatattctcaaggccagcggctgcggcgcgcgcgtcgatcttgatgcgatgccgttctcggatgccatgctgcgccaggttgagcctgagcaggcgctgcgctgggcgctctccggcggtgaagattacgagctgtgctttaccgtacctgaactcaatcgcggggcgctggacgtggcccttgccaacctcggcgcgcgttttacctgcattgggcagatcctgccggaatcggaaggtctccagttcacgcgcgaaggtaagcccgtcacgttcgattttaagggatacgatcattttggcgcgtagtagagatgtggcgaaaagccgcctgaagatgagcaacccctggcatctgctggcaacgggatttggcagcggccttagccccgtggttcccggcactatgggatcgctggcgtcgatccccttctggtatttgctgaccttactcccctggcagctctattcgctggcggtgatgatgagcatctgcattggcgtctatatttgccaccgtacggcgaaagatatgggtacccacgatcatggcagcattgtctgggatgagtttgtcgggatgtggatcaccctgatggctctaccgacgatggactggcagtgggtcgccgccggatttgtgattttccgcctctttgatatgtggaagccgtggcccattcgctggttcgaccgtaatatccacggcggaatggggatcatggtggacgatattgtcgccggggtgatttccgccggggtgctgtacgtgattggccaccactggccgattggtcttttctaaacactgtccgggcggctggcctcgcgcccctgggaaatggatcaggcaggcttttcccggaggcggtgctgcgcacctgtccgggctaccggcccgcaggcgttggtgagtcagtcgcccgggcagacgctttgcgtcgcccccggaagcagaacctgtagcccggctaagcgcagcgcgagccgggaatcggcagggaaccgcgcgttacttgaaccccacaatcgggtgcggtttatacggcgtctccagcttttcaatctgatccggcgtcagcgttaaatcgaccgcatgcagcagctcatccagctgctcctgccttgaggcgccgataatcggcgcggccacgcccggcttgctcaatagccaggccagcgccacctgcgcgcggttggcgtcaagctcttccgcgacttcggccaggtttgtcgcgatcagttcatcattctcatcagtggcattgtagagcgccttaccgacttcatcggataccagacgggcggtggtttccccccacggacgggtcaggcgaccgcgcgccagcggactccacggcatcaccgcgacgccttcacggctgcacagcggcagcatttcgttttcttcttcacgataaatcagattgtagtgatcctgcatggtgacgaagcgggcccagttattctgccgctgtagcgctaacgcctgggcaaactgacgggcatgcattgacgatgcgccgatatagcgggctttacccgccttgacgacgtcgttgagcgcttcgagagtttcttcaatgggcgtggtgtaatcccagcgatggatttgcagcagatcgacatactccatgccgaggcggcgcaggctgtcgtcaatggatcgcaggatctgcgcgcgcgacagtccctgcggcagatcgcccacctgatggtaaaccttagtggcgacgatcacggaatcgcgacgagcatactcacgcagcgcgcgcccgaggatctcttcgctgctgccgtcagagtagttattcgaggtgtcgaagaagttaatgccgccctcgagggcgtattttatcagcgggcggctgctctcttccggtaaggtccatgcatggttaccgcgatccggttcgccaaaggtcatacagccgaggcagagtcgggaaacgcggagatcggtatcgccaagagggatatagtgcatagtgcgctcctgctacgggtaaagggtatcctttaagcatagcaggagcggtggcggcaattatgccagccaggcgtggattttggcttctattccggcggcgtccaggccgaggtcggcgtgcgcttcttcctgggttccctgcgggataaagaaatcaggcaggccgagattgagcacaggaaccgcgcggcggcgggacatcagcagctcattcacgccgctgcccgcaccgcccataatggcgttctcttccagggtgaccagcacttcgtgttctgcggccagctgtagcaccagcgcttcatccagcggtttggcaaagcgcatatccaccagggtggcgttaagcttttccgcgacttttgccgcctgcggcagcagcgtgccgaagttcagaatcgcgattttttcaccttcgcgtttcaccacgcctttcccgataggcagcgaggccagcggttcaaacgcggcgccggtaccggagccgcgcggatagcgcaccgcgctcgggccgtcgttgtagtgataaccggtatacagcatctggcggcactcgttctcatcgctgggggtcatgatgaccatgtcaggaatgcagcgcaggaaggagatatcaaacgcgccctgatgggtttgtccatcggcgccgacgatacccgcacggtcgatagcgaacagcaccggcagcttctggatggcgacatcgtgaatcacctgatcgtaggcgcgctgcaggaaggtggagtagatcgccaccaccggcttatagccgccgatcgccaggccggcggcaaaggtcaccgcgtgctgctcggcaatggccacgtcgaaatactggtcggggtattttttcgagaactcgaccatcccggaaccttcgcgcatcgctggcgtgacggccatcagcttgtcatctttcgcggcggtttcgcacagccagtcgccaaagattttcgagtaagagggcaggccgccgctgcttttcggcagcacgccgctggtgtgatcgaattttggcaccgcgtggaaggtgatcgggtctttttcggcgggctcatagccgcggccttttttggtcataatatgcaggaactgcggccctttcaggtcgcgcatattcttcagcgtatttaccagaccgataacatcatgaccgtccaccggcccaatgtagttaaagcccagctcttcaaacagggtccccggaaccaccatccctttgatatgttcctcggtgcgtttgagcagctctttaatcggcggcacgccagagaagacctttttgccgccttcgcgcagcgtggagtagagtttgccggagagcagctgcgccagatgattgtttagcgcgccgacgttctcggagatcgacatttcgttgtcgttgagcaccaccagcagatcgggtttgatatcgccagcgtggttcatcgcttcaaacgccatcccggcggttatcgccccgtcgccgattacgcaaaccgcgcggcgctgcttatcctctttggctgcggcgatagctatgccgattccggcagagatggaggtcgacgagtggccgacgctcaggacgtcatactcgctttctccgcgccacgggaaggggtgcagcccgcctttctggcggatggtgccgatccgatcgcggcgtccggtcagaattttatgcgggtaagcctggtggccgacgtcccagattaggcgatcgaaaggcgtgttgtagacgtagtgcagcgccacggttagttctaccgtaccgagcccggaggcaaagtgtccgctggagcggctgacgctgtccagcagataacgccgcagttcgtcgcacagtttcggcaggctatctttcggcaacaaacgcaactcctgggtggaatccaccagcgccagggtcgggtatttggcaatatcaaaactcatcagagactcatttattgtttatttatcacgctgaattatgtaattcgcgagcgcttccagtgccgtggtatccagagattgcgcggccagctcagttaacgaccggcgggcgtcggtaatcaggtcaaaggcctttttccgggcttgctcgagtcccaaaagggcggggtaggtacttttgcccagctgctggtcggctccctgacgtttgccaagtgtggcagtatcccctaccacgtcgagaatgtcatcctggacctggaaggcgagaccgatgttctcggcgtagcgatcgagagcgggtagcgccctgcgtccggcttcacctgcgctcagcgcgcccattcgtaccgcggcgcgaatcaacgcgccggtcttatggcggtgaattcgctccagcgacgtcagatcaacctgatggccttccgcttccagatccagcgcctgaccgccgcacatacccgcgatgccgctggcctgggccagctcagaaatcatcgccaggcgatcgcgatccggcacttccggcatcggcgcatcactcagtatagaaaacgccagcgtttgtagggcgtctccggcaagaattgcgttcgcttcgccgaattttatatggcaggtcggctggccgcggcgtaaatcgtcatcgtccatcgccgggagatcatcgtgcatcagcgaataggcatggatgcattcgacggcggcggcaggggcatccagcgtagcgcggctaacgccaaacatatcgccggtcgcgtaaaccaggaacgggcgcaggcgtttgccgcctaatagtgcgccatactgcatggcttcgaccagcggagtgttctgaaagggctgcggagcgataaaacggcgcagcgcttcgttagcctgctcgacgcacgcctgtagctgttgcgggaagtccatttattcagcgtccggcgtaaaaggggtaagcggcgcgtcttcgctatccgccagcagaatttgtacgcgctgttcggcctgctgcagctttgcctgcccctggcgcgccagctggatcccgcgctcgaattcgccgagcgcttcttctaacggcagcgagccgctttccagacgattaacaatttgctccagctcgcccagggcggtttcaaagctggccggggcctcatttttctttggcatagtgaatatagactcttgtaatgtctcgatggctatcaatatggtaacgaagtcgcgcggttaatcaaataacgcgcaatgccaggtgaaaagcgtccaatagtggtatactccgcgccctggatgcagacgccagtcgcgcctgtacaactttttatgcttaaagccccgtcgggcttgccaacgaatagtgtcgccatgaagtttatcattaaattgttcccggaaatcaccatcaaaagccaatctgtgcgattgcgcttcattaaaattttaaccgggaacattcgtaacgttctcaaaaactatgatgagacgcttgccgtcgttcgtcactgggatcatatcgaggtccgggcgaaggatgaaaaccagcgtccggctattcgcgatgccctgacccgtatccccggtatccaccatattctggaagtcgaagacgttccttatacctctctgcacgatattttcgagcagacgctgccgctgtggcgtgacgcgctggaaggtaaaacgttctgcgtgcgcgttaagcgtcgcggtaagcatgagtttacctcaatcgaagtggagcgctacgtcggcggcggtttgaaccagcatattgaaacggcgcgagtgaagctgaccgaccccgatgtgacggttaacctcgagatcgaaaacgatcgcctgctgctggttaaagggcgctacgaaggtatcggcggtttcccgatcggcacccaggaagacgtgctgtcgctcatttccggcggtttcgactccggcgtttccagctatatgctgatgcgccgcggctgccgcgtgcattactgcttctttaacctcggcggcgcggcccatgaaatcggcgtgcgtcaggtcgcgcactatctgtggaaccgcttcggcagctcacaccgcgtgcgcttcgtggcgattaacttcgagccggtggtgggtgagatcctggagaaagtcgacgacggtcagatgggcgtggtgctcaagcggatgatggtgcgcgcggcgtcaaaagtcgccgagcgctacggcgtccaggcgctggtcaccggcgaggcgttaggccaggtttccagccagacgctgaccaacctgcgcctgatcgacaacgtctcggatacgctgattctgcgtccgctgatttcgcacgataaagagcacattattgacctcgcgcgtgaaatcggcaccgaagattttgcccgcaccatgccggaatactgcggcgttatctcgaagagccccaccgtgaaagcggtgaaggcgaagatcgaggcggaagaagagcacttcgatttcagcatccttgagaaagtggtggcggaagcgagcaacattgatatccgcgatatcgctcagcagaccgagcaggacgtagtggaagtggaaaccgtcagcggttttggccctgacgacgcgatcctcgatatccgctctatcgacgagcaggacgataagccgctgaaggtggaaggcgtggacgtggtttctctgccgttctataagctgagcaccaaatttggcgatctcgaccagagtaaaacttggctgctgtggtgcgagcgtggggtgatgagccgcctgcaggcgctgtatctgcgcgagcagggctttgaaaacgtgaaggtatatcgcccctagttcttcaggagcaaggcgcaatcatgaaaacggcaaccctgggttgccgttttgcatttattcgtagtagttataaattcctgccgccatcaccagctgtgaagcgacttcgtgcgctttttcgcgtccaaccagcaggtcgatcatcttcaaggcgaaatcaattgaggttcccggcccctggctggtgagcagcttaacgcgagcgtcccagacgacgcgcttatcctgccactgctcggcgggaatgcgttctttcagcgccggaaagccggtcatattgccgatggggaaaaggttgtgcggcaccagcacggtcggcgccgcggcgcaaatcgccgcaacgatacgcccggaaagatggaattgacgtactgtttcaaccagcagcgggctgtcgcgaaagcactctgcacccttaatgccgccgggcagaacaaggatatcgaaatcgccatcggccacttcgaccagcggcgcatcggccagcagcttaacgccgcgcgagcagacaatggtcaggctgccatcgctggcaacgctggcggtcgtgacctttacgcctccgcgaacgagtaaatccatggtggtgaccgcttcggtctcttcgctaccaggggcgaggcaaatcagtgccgacgcgctcatattcattctccttacgctttaccagttcaaacaggcgggtattctcaggtacggcgataccgtgggctcgggcgcgttttaacagataaccggtgatatagtcgatttccgtatggcgctgggcgagaatatcctgcagcatggaggaggtattttctgccgtactttcaataacctgatgtacatagaataacaggttttccggcgaggtatgcatcccctcgcgatccatcaccgccgcaacttcataacaaatcgcggcgacctcctgcgggtattcgcgtaaatcgccgttctgacagttttttaacgccgtcagcgggttaatcacacagtttaccgccagcttgctccaggtcgcggggtagatattgttatgccaggcgacgtcgggcagcacgctctgcagtacatcggcgagatagctataatcctcaggataggctttcgccgggccaatatggctggtgccgttggcgacgtggacgatcacgttgccgtcgcggcgggccgcctgcgttgtcgaagccagaagcagcggctgtttgaggcttttaagctcgtcaacggtacccataccgttgtgcatgagcagaacaggtactgacgacggcaggatggcgctcaggttttttaccgcgttagagacctgccaggctttgagggtgaccagcagcaggtcgctgctggcgagaaaatcaggatcgttagcggtaaacgattcattaaacacgctgccgtcggtttcaatcacattgacgctacagaatggctgtgggacgcgtaaccagccctggacttcatgtccgtgtttgtacagcgcagttagccataactgtcccagtgcaccgcatccgagtacggttactttcattattcctcctcacctgtgagtgctgcatcaggtgctcatggctaaagtatagcgttatcagttatcctttcgggataacaagttgagttatgtcgcgttgcgggtattatgcaacgcaaaagaaactgaaggagaggaaaagatgccatctttcgatattgtctctgaagtcgatcttcaggaagttcgaaacgccgtagagaacgcgacccgcgaagttgaatcgcgttttgatttccgtaacgtcgaagcgagctttgagctgaacgaaaaaaacgagaccatcaaggtcctcagcgagtctgatttccagattaaccagctgttggatattctgcgcgccaagctgctgaaacgcggaattgagggcagttctatcgaagtgccggacgagttcgtgcacagcggtaaaacctggtttgtcgatgcgaagctgaagcagggcattgagagcgcgacgcagaaaaaaatcgtcaagctgattaaagacagcaagctgaaagtacaggcacagatccagggcgaagagattcgcgttaccggtaaatctcgcgacgacctgcaggcggttatggcgctggtgcgcggcggtgatttaggtcagccgttccagttcaaaaacttccgcgattaaaagagtcccgtctgtcggccgggctcggcgttagccgccgcccggcaggacacaaagcaccgctcagaaccgtttttgcctgcctgaacaaaggtgctcgcttttatatccctttgattgcctgctcaatttcaaagcggttagtgatcttgctgtcgattttgatatacaccgaacgctcttcgctaatcaccagcacctctttgacgccctctttagcccgtaagcgcgcttcgagcattttgtccgcggcgatatcctccgggatttcgacccgcaggctgctaacgtagggcggctcgctcatggtgctggccaccagcagccacagcatcgccagcagggcgccgagcaggaagacggtttgcgaatcaaaaaagccatccacccagccgccgagcgctccgccgatggccacgccaaggaactggctggtggagtaaatgcccatcgcggtgcctttatatccggccggtgattctttgctgatcaacgacggcagcagcgcttccagcaggttaaacgcgaggaaaaatagctgaacgccggcgaccagctcccagaaatagcctccggcaccccagagtacgatttcagcaatcagcaggatggcgacgcacagcaggaagacgcgcttcattttgcgcttcacttcggcgtagataataaacggcaccaccgcgacaaatgagaccagcatggtgaccagatagattttccagtgctcggcggcggggaaaccggcggcctcaagctggcccggcagagcgacaaacgtggacatcagcatgatatgcaggcacataatgccgaaattgagcttcaggagttttggctcggcaagaactttgctgaagcagcctttcaccataccggactcgcggttcagcacgtgattctggctgttcggcacaacccatagcgtcagcaggatgccgagcgtcgccaggagagcaatcatccagaacagggcgtgcaggccgagttggtgggtaacgacaggcccgagaaccatagcgatagcaaaggtgacgccaaagctgacgccgataaacgccatggctttagtgcggttttgctcgcgggttaaatcggaaagcagcgccatgaccgcagcggcaatcgccccggagccctgcagcgcgcggccaagaataatgccccagatagagtcagaaagcgcggcgataacgctgccgacaacgaagattaacaggccgccgacgatcagcggcttacggccaatgcggtcagaaagcagcccgaaaggtatctggaatagcgcctgggccagcccgtaaattccaattgccagtccgataagggcttcgcttgcgccctgtaacgccatgccgtaagtggtcagaaccggcaggaccataaacatgccaagcatgcgcaaagagaatacggtccccaaaccccaggtcgcacgcagttcgcctggcgtcattttattatcgttcattaccacctcaatataaaaactgcgcatagtgtagtggggggaaacagaagcgtaaataaatgtttgtttaacagatattacgactgtgttgcatgatgaggtgagtacggtagaaagaaaaaaccagtggaggggcctccactggtgttcagcggttattggcagttaaagtcaacccactggccgcctgcgtcggcggatttgacgcactgctcaacccagtaaacgccgtgaagaccggcttcgacgtccggataccagaaggtctccaggaacgcctggtccccgcgatccatcgcgtcgatggcgatagcgtagcggcgatagaggttggcccacgcctcgaacagcccttcagggtgaccgccgccaatgcggtcgtccgccagcgcctgctggctgagatagggcatcccgcgctcgaggacgcgggccggttcgccctgtacctcgtagctgagctgatttggacgctcatcccaccattcgatgctggctttttcgccaataacgcggactttttgcgagtgcatcgcgccgctgttgaccgcgctggtccacagtgagccaacggcgccgttgttatattccatcagcacaaaggcgttatcttccagcggcgcgcgagatttgacgaagctttgacgcgcgcacatcaggcgggtgatgttcaggttcggcaccatcgtctcggcaataaatagcgggtgggttgccagatcccccagcacatagctagggccggcatatttgggcgttacccgccagcgggtggattcagcctgcagctcaacggcttcattatgaaaaccgtgggcgaactgcatattaataatgcggatctcgccgagcttcccttccgctatcatctgccgcgcctgctggatcatctggtgtccggcataaccgtacgtgacgccgataattttattctgctttttgcttagcgccagcagctcgcgcgcttcgtcggcggtaaagcacagcggtttttcgcaaatcacgtgcagcccggcttcaagcgccgctttagtgatagcgaagtgagtattgttcggcgtagtgaccgatacggcttcaatgccgtcagggcgtttggcctcctccgcgaacagcgtttggtaatcggcgtagcagcgttcaggagcgatgccgagctgctcgccgaattgacgaccgcgctcggcatcgatatcaagcgcgccggcgagcagagtaaagacgttgtcgcgaagcgccgcacagcggtggctgtagccaatctggctggtgccgccgccgccgaccatgccccagcgcagggagcgggataagggtttcatgccgtttaacatgatggtgcactcctcaatgatagagatcctacggatttcagatgttcttctgtgtacccgcgctcgccgagcgcgggcctggttctaaggttttacatctcgccacgggcttcgcgttctttcaggtcatgcatgatctgcgggtattgcttatccaggcgataaaacagcagggtgataatgaccacgatccacaggaagaaagagccgtagagataaacgtggttaatcatgtcgatagcgctttgcggctgaacgccggatccgctgctggagctgacgtaacccgccatgctcagcaggcccgagataaccgcggcggcaatacctgcgccgagtttcgtcccaacggaaccggcggagaagatcatcccttcctgtctgacgcgcgttttccactggccgaattcgacggcatcgccgcagaagccgaacagcacggcgttcagcggggcgaagccaataccgcgaataatcgcgtttgccagcgcccagtggtaatcatcagagttaaacataaacagcacctggccgatggtcgccagcacgatgccgcagagggcaacgttgcgtttaccgtatttgcggatgggcacggagctcaggaaggtgaaaataataatgcaggcggtttcggcaacgaaaatggagctatagaaggtatcgtcaccgagcacgtagcggcagtagtaaggcagcgcgatccctaccacggtgtagtacacgctttgcgcggtccacaggatggcgctggcccagaagtactggttacgaaaaagcgcggaaagctgggtttttaccggtacgtttccctgtttctctcgcgctttgatgaccaccttctcttcgcatttataaaagcaaaacagcagcaacagcagcgccagaaaagcccaaatagacatggttttgatccacgccgcctgatcgtcgccaaagtacttcaccagcggcaatgtgcaggcaacggcgagaatacgaccaaaaggcgacatcgacattcgggtgatgctgagcatatccctttcccatgaggcgcgggtcatcatcgcagagaggctgccgtaggggaggttgatggcggtatagcacacggtggtgcagaagttataggcgaccagcagatagagaaactgcagcgtgccggtggtctgcgggacggtgaacagtaaaattgccgatacggcgtagggtacgctcatccacagcagccagggtcgtgatttaccccagcgagagttcgtgcgttccaccatcaggcccatgatgacatcggaaacgccgtcaaacagacgtgagatcagcatcaccaggccaacggtggcgatgctgatgccgacatagtcggtataaaacagggttaaaaccgtgccgatcatgccgaaaacgacgttacaggcggtatcgccgccgccgtaagcgattcgggtagcccagcttagcttatcgccgcgtgctgccgcgggagagagaagaatctgctgttcactcatggtcaattcctttgtctggaaggacaagtcaggacctctgcgccagttccaccggcacgaccttatcctgaatatcagccagaacataaggaaatatttatttcatttcaatgcttgtttggaatttaatttctgtatatgcgaggcggatcgaaaaaccgtaaaaattgagccgtaaattttttggctacagctatcaagtcattctgattgataaggttattaagtgtttttctggacgatgtttgatttgtttattgtatggatttaatgattttgcgctgtgattttgtgaagtgaatcgatactgcatggcatttttatttttcattgttcatttaaatgaaattaattttctttttttggcaggcgtgtttttgaaacacgcccgccttagcgtcaacgtttaaaatgtacttctgacgggcgcggttgacgcggtggcccttgccgtcgggccagccgcgaaaatacctttggccgccagcccggcgacggttatcgcggcgggaatgccaaggatcaggaaaacgctttcgaagctgatattcagcgccagcatctccgccccggcaaaggcgctcaggatcgcgcccatgcggccaacgccgtgcatccagctggagccggtagcccgtgcttcggtaggatagtagcgggcggagagcgcgttcatgccggtattggcgccgtttaagcaggctccgctgataaatgccagcaggcagatgagcgcaaagcttgccgcggcatagcccatcgccatcgtaaacaggccgccaaccgcgtaaatcagcccgagcgcccgatgtgggttgatccggtccattagccagcccgcaaacagcgagccaagggttcctcccgcctggtacattgcggtcattaccgccgcctggccgaccgttaagcccacctcttttaccagcgtcggtagccagctgccgaggaggtaaaccaaaaaaaggcccataaagtaaaccagccagagcatcatcgaaccgaagcgatactggcgggagagaacgatgcgcatggcatttgcctggacgggctgggccgggaggctgaactcggcctcatcggggatttgtcccggatagaggcgctgcataatccgccgaatacgttcggcaggcgcgcgcttaacgaccagaaaacgcaccgattccggtaacagccagatcaggaccggagcgaacagcagcgggaggatcccgccaagcagcatcagcgagtgccagccaaactgcgggattagccaggatgcggagaaaccgcccgccgccgcgccaaaggtgaagccgcaaaaaataattgtaatcaggaacgagcgctggcgctccggcgcatactctgacaccagggtgccgatattcggcatggcggcgcctaatcccagcccggtcaggaagcggaaaaccatcatctgctcaatattttgtgaaagggcggttgcgatggtccagaagccgaagaagaagacgctattaatgataatttttttccgtcccagccagtcggcgagcggcccggagaaaatggcccccagcgccaggcctatcagcgcggcgctgatgacaaaaccgagttggtgattgcttactccccattcctgcttcagcgtcggggcgataaaacccatgatggcgatatcaaagccgtccagcgcgataacgcagaagcctaaaaacaccaccagcttctgaaagcggcttagcggattggcgttgattaactccctgacgtccaggcgttgagtctgtgtcatgggactctccttatgcgcaagggcgcaggtaggactgcgcggcgttaaacagcagttgagcgcgagcgagcgccggtagcgcaccccgagcgccgcttaacgggacctcgatggataccggcagcgtggccggaagcgccgccatcagaccgtgcaggtcgagtccgccttcgccggggacctggcgcgcggcgcgggcctggtaaatcagctcctgctcgtcagcggggggttgcggtaaggcatcgcaaagctgcatatagttgaggcaattttgcggtagcgccgcgatcgtggacagggattcgccggcccgccagaagtgaatagcgtcaatcaaaataccgatatcgctgcggccgctggcgttgatgagcgcccgggcttcggcaatggtgcgcaggtgggtccagggcatgggctccaggttcatggttaatccatacgcctggccggcttcggcaagacgagcgagattttctgcgctgcgcgtcctgttttcatcgtttccggcgactaaaacctgctttgcgccaaggcgcgcggcggtcgtcagaaaaagctgcaaacgagcgtccaatgaaaaatctgccgtcaggcggacgatctcaacgtccgaaacgcgaacgccggtttccatcagcgccgccagggtatcgcgtacggcggcggtgtcgccgagcatgtcgtaatccggatctgatggggttgcgggaagcaggcgcagaccaacgtgggtgaatccggtctgggccgcaatgcgtacctgttccggcggcggaacgtcgaggagggtaagcgcggcgagtgagagggttcgcatgttcataaaggactccagtacagttgcaggtgattgttgttatgcgtattgccgtccctggtggaatgcttttactgtgttgttttattgagattttctgccaggttttttccgaccagatagccaaaagtcatggccgggcccagcgtgataccgccgctgggatagaatccccgcatcacgctcgacatatcgttgccgatggcgaaaagcccctggatcggctgccgctgggcgttgagaacacgggcattttcatcggtgattaatccactgaaggaacccagcgagccgggcaatatgcgtaccgcataaaaaggcccatggctgagtttcccgagcgtggggtggggcgagcggctggcgtcaccctgcgcgcggttataggccgaggcgccgcgccgaaaatccttatcctctccctggtctacaaagccgttaaatcgggcgatcgtttccgttagctgctgcggattgatggcgcatgttttcgccagcgcttccggcgtctcacccacgtacagatagccggtccgtcgccaggcctcgggggtaaacgggaaggggcgagcatggcccaacccgtagcgccgcagcgcacggccgtcggcaattagccacgcctgcggcgtttcgcccggcggcgtcgcgtccagcagtgcggcaataaaatcatgataagagtcggcctcattggtgaagcgtttaccgttgggcaacacggcgataaagccgggcttggcgcgctcaaccagatgcgggaacggcagctgcagcccgctggcgagggtaacgcgcgacaccggcgcccaggccatggcgtgcctgagtgaggtatcaaactggccgccgaccgcttcgccgagccgaatgccatccccctgattgcccgggggcgcggcggagaagtggccgtagccgctggcggcgtgcggcacattttcggccagacgctgcctgtcgtgaggaaagcctccgcaggcgaggatcaccgcgcaggcgcgaacctccagcgcgccgccgtcgctgcgtaatatcgcgccagcaacgccgttgttgtcggtaagcagacgttctaccggcgcgttaagctgaaaattaacccccgcatccagcgccgaacgcagcaggcgggcgaccagcgcgttgccgttaaccagatgctgtccgcgaccggcgcgcagccgctgccagccgtgacgcagcaggcggcgggtcgcatacagcgccgagcccggtgagcgggtcgcgttgaaaaagtgcgccatgtccgtgccgccggcaatgcccatacccgcaaggctgatggtctccagcggaggccgcaggcgatgcagccagtcgcccagcagccgtccgtcaaaaggctgcgccgtgaccgagcggccgcccagcgcagcgcccggtgaagcgtgaaaatcgggcattttgctgccggaaagaaactgcacggcggtacggcggcggaaaaagtcgatcatctccggtccgtactgtaagaaggtaagcagacgcgcatcggcaggctcaccgtccatttcatggcgtaaataagcgagcggcgcgcccggctcttcttcaatcccttcttcacgagccagcgggttacgcgggatccacagccagccgccggaccaggcgctggtgccgccaatgaccgactctttctccgcaaccagtacgctggcgccgccgagcgcggcggtgacggcggcagagagccccgccgcgccggagccgacgaccagaacatccacgttcatctgcccgctcatgaccctctccttattgcagtggtgaaaaatcagtggggcgcagaagcaccgactccaggcgctcgacggcggccagctcgcggtttttgcgcgagaacgtcagccagcgttcgtcctgcgtcatgcgcgcccgacgcgccaggcgatcgtccagactttcataggcccagatatgcaccacctgattgaccacgccaatttcggtaaagaagaagccgatgagcttaccgaggtgctcggtttgcacggcgtaagcatcgcttttgtacagcgccagccagtcggccattttcagcggattgatggtgtaggtgcgtttttcatagatcatgattttctcctgtttatagtgcgtgttgttgcgccatatggctggctgagagatagccgaaggtgagcgccggaccgagcgtaatacctgggccggggtaggttccggccatcatcgaatccatatcattacccacggcatagaggcctttgatcggctcaccgtgctggttaatgacctgagcatcggcggtagtgaccaggccgcgcgaggtaccgagatcgccggtatagagggtgacggcataaaacggcgcgcgggtcagcggagcgttacaggcgtttggccggtggccggggtcgcccatcgcgcggttatagctgttgccgcctttggtgaacgccggatcgaggccctgagcggcatcgcggttgtagcgtgccaccgtgtcagcgagcgtctgcggatccaggccgagccgctgcgccagttcaggcagcgtatcggccttatgcagatagcccgctttcaccagcgcgtcgttattgaccggggcagggcgcgccaggccgaggccgtagcgcttcatggccagggcgtcgcaaatcagaaagcagggcgcattttctgcccggctttgcatggcgctggcgaagtggtgataagagttagattcgttcacgaagcgcaccgcgcgctggttgacggcaatcaccccgggtttggcgcgatcggtgaccaggtgagggaagcgctcttgcgtgccgtcgggatgctgtaaaaccgagaccggcgcccagaaaaagttagacggcaggtcagccccttcccgggcattgaccgcggcggcaaggcgcagcgcggcgccgtcgttggcggcgggggacatggtgtagtgctcgcgggtctgggggcgatagcgttcagccagcctgcctgcggcaaaaccacccgccgccagtaccaccccgcagcgggcttcaagagcctgcttttgaccctcgcgctcaattactacaccggtcacctcgccattgcgttcgctcagcgaaagcacgttgacgttgagcctgagctgcatacctttgcgaaaggcgagcgtcgccatgcgggcgatcagcgcgttgcccatcgccaggcgggtaccgcgagggtaccgcaggcgatcgcgaccgaagcgcagcagcagtctgcagcagtgcgcgaacgagcgcggggagcggcgcatatcgagaaagtgctggatatcaacccggttaaccatcatcccgccaaacagcagcattcccggtgggggagagcggaggtcgcgaaaatgcgcacccagttcccgtccgtcaaactccaccacctccagcgcccgcccgacatcgacggcgccgggctcatccgggtaataatccggagagagcgggcgcaggctatatttcaccgcaccctctttttcaagaaacgccagcgcctcgcgccctgaagcgataaaggcatccaccagatcctgacgataatgaggctcaccgataatcgtccgcagataggtttcgatggcctgcgggctgccgcccacggccattttccgcgcctgatcgctatcgtggatccacaccgcgccgccggaaatggcggaggtgccgccaaactgcggggctttttccagcatcagcaccgacagtcccttacagctggcggtcaccgccgcggcaaagcctgcggcgccgctgccgataacgatgacatcccagcttttcatgccgccgctccttgttcctgcgcaatggcgccgatgaattgccccatcagtttcatctgcgccagcgccatctccggcccggtctggatcgcgcagccgcgatcccgggcgaaggcgaggagcggggtgatgatcggggcggtcaccacgtcggcgacatgcgtggatagcggaagggtttccagcagcgactgcggcagcggcaacggctcgaaaccggccattcccgccggggaaccattcaccagcaaatccaggccggcaagcgtagcgggcaggtcgacgagatgaacgtgcggaaaatgggtggccagccggttatgcagcagctgaagggtggcgggattctgatcataaagggccaactggcggatgcccgcttcgcaaagcccccacgcgatagcgctgccgacgccgccgcagccggagagcagcccctttttaccgccggcgctaaagccgtgcgcctctgcggcaagctgaaaaccgacgccgtcgagcatatcgccctgtaaacggccatcggccagcttacggatgacgttaatggcattaaggtgctgagctcgcggggataactcgtcgaccagggcggcggcccgctgtttgtgcggaacggtgaccaggacgccgctcatgttgtgccagccgcgcagggcctgcagaaagtcagcaacggcttcgggggcgatatcaaccgggatcatgacgctgtccatctgctggtcagcaaagaagcggttgaaattctccggcgacttaacctgggtaatcgggtggccgatgacggcgacgacctgagtgaatccactgaccatttcaaacctcattttgttaaatgaatgttgtgaaagtatttcagcggaagctgagagcgacaacgcagaattcggccatactggttgttaatcgcactaccactgcgataatcgcgctaaactgattgtattgttgcgaaagtgtgaacaagtatgcaaaaccagattcatacccgcgatctgatcgtcggcctgcaaaaagggctggcgctgatccagctattttcaaaagagttcccccggctcaccgtgccgcaggcggcgaaaatgagcggcctgacgcaaagcgccgcgcggcgctttttccttaccctgctgcatgagcgctatctgcaaaccgacggacgccattactggctaacgcctaaagcgttaaggctggggcaggcgtatgtcgattcggcgcagttcccacgcatggtacgaccgatcgtggagtacatcgccagccggacggaagagcacgcttcggtcggcgtgatcgatgatgatgagctggtgtatatcgcccgcagtaaacacacgccgtttaactcgacttcagtgcgtctgggggagagagtgccgatttactgtactgccggagggcgactatggctggcttcgttagaggaagccgagtgtgaaaccgttttgcagcggatccgccgcgagcagcgtacgccctatacggtgacggacgtggcggcgttaatggaaaagatcgctcaggttcgtcgccagggatacgccgcgattgagcaggagtttgaaattggcatgctggtcctggccgtgccgctgtcagatcgggaagggctatactggggagcgctgagtttaaccagccatcagtcaagaacctcgattgaggcactatgccgcgatcatctggatttgctctatagcgctcaggcgatgctggtgggttaaaaccagaggcgcagacgattctctcatcttcgtgccgagagggcttacggtaggcaaaaaaagggcaggaagaatcctgccccgggaatgactaaccgatattaggcggtgatgctgttagtgaaagtgttccactcgcccgacaggttgtgcacagcattgctccagttctcattgcttgcggcaacgtagttctcccagtcagatgcgccggtaaggaatttagcgaactcaacggtatcgttaacgatggcattggcgatagtggcacctgctgaggtaataaaatcgctcagatagtttccattatcaacaataaagctggtaatgctgttagcaaaaccgagcagattaaaaccaccagaaatagattccatttcgccaatagttaattctttcattggtattccttgttaagtctgattaattgttattagtggggctattacccacggaagaaatactaacacccttaaattaaattaatccagagtgttaatgtgtgaaatatttaatttcatacaaacttaataaaatgaagattatcttcagtgataacggcttgagtcatgagtgtgaattttttattcgggccggctggctttaatgtgaattggcgtgacagccgctataaagaagaatgcgctgagcgtggttaaagaggggagataagacagggtgttattttcccatttaaaactttaatattgtgcactatagatgctatatgaaccgggcagaacaatattcatggcaaaagagaggcagctcgcgcggggaaggggagggcaagagaacatcgccctggtgtcataccccacgttaatatgtttattttcgatttcacattcgcccaccgggaatgacggaagcgcagcccgctgagtaaacgagggcttaacaatgccttgttaacccggaatgacgccagcgttcgaagaaacaaaaagttcggggtatgtctcttctactatattgcgtacaataaattaatttagcgtatatattcagctaaaccactcagcgcggtagcgggattcatctctcaatagataccatcgctgtccgctatggacaaaccatgtttagcgatcatttgttaaacaaaaggctaattcatctaaataaacgataactgcaggataatgaatggctgctgattaatctgatgcagctattagtcaaaacgaattggcagtactgcgtgactattatcgcctcagtatggctaaacccgttccggcagtaagtggagaaaggcgtatccggaggagggtttttgatcgaggacgctgaggcggaatttagctacggacagagaaagcattgagagggcagggggcacaatctcagaataatagaaaggggaggagtgaatgattgaccactatcggcgatgagagattaacagggggaaataagtaatggcgtatcgcgcgatacgccattgagagatactatctgaccatggtcagcaggttgtgtgaatccggcaccataaagtcgacggacatcatcaccgacagcgcggtaatggccacgatggaaaagacgaacagcttacgcgcccagactttatcatccgccactttataaccgcgcagcgccattccgagccaccagacgctcaccgccgcagcgacaaccagatatttatatccagcgtagccgcccagggagagcatcagcgtggcaacggcgaaagcgatgatgtaaacggtgatatggtttttcgccaccgaaatgcctttcactaccggcagcaccggaatattcgctgcctgataatccttgaagcggaaaatcgcgatagcgtaagagtgaggcatctgccacaggctgaaaatcgccagcaaaattgcggcaccgctgtcaaaatcaccggtaaccgcgcagtagccaatcaccggcggcgcagcgccggagagagaaccaatcagcgtgccgtagacggagtggcgcttcatgtacaggctgtaaacgccgacataaaccacgaaccccatcacccccagccagcaggccaggggattcgcgccaaaccacaggagcatgaagccagcaatacccagcagggtggcgtataccagcgaagcttctggcgagatcagccctttgaccagcacccggtttttcgtccgttccatcttacgatcgatatcacggtcgatatagttgttgaaaacacaacccgaggcgaccaccagggatactccgaggagcgtccagataaaaagcggatagtcgatgtggcccttggaggccagcaggaaaccgccaatcacggagatcaggttgccaaaaataatgcctggtttcgttacttgcaggtattgcttaaacatactcgccgctcttagtgcatcatcatgttgtagttcaggttccacataatccagatggagccgacaactacgatagcaatgatgattacggtgaagataaatgcggtcaggttccaaccttcgtccgatttactgttcatgtgcaggaagtacacgaggtgtaccacaatctgcacaaccgcagtaaccaggatggttcccagaatagccgcatgcgatgcagatccactcatcaccattgcaaacgggataaccgtcagaatgatcgacaggatgaaacctgtcatgtagctcttcacgctgccgtgagaagcgccgctatgatcggtagaatgactcattacatcgcccccatcagatatacaacagagaacacgcagatccacacgacgtccaggaagtgccagaacaggctcaggcacatgatacgggtgcggttagtgctggtcaggccgcgacgagaaacctgaaccatcagcaccgccatccagatcagaccagaggtcacgtgcagaccgtgggtgccgaccagcgcgaagaacgctgacaggaagccgctgcgatccgggcccataccttcaacaatcaggtgatggaattcatagagttccatcgcgatgaacccagccccgaagaggaaggtcagcgccagccaggaaaccacctggctcttgttgtttttgtacatggcgatagccgccatgccgtaggtgatggagctgaacagcagcagcgcggtttcaaccagaacgaacggcagttcaaaaatatctttaccggtcggaccgcccgccgtgccgttcaccagaacggcataggtagcgaacagagtggcgaagataatgcagtcgctcatcaggtagatccagaaaccgaataccttcatcggtcctgtatcatggtgcccgtgttcgtgcgcgtgggcgttatgcgcaagagtatcagttgccatttttcagccctgctttgttaatctcatcgaaatgctgattttccagtttttcgactactgcaaccggcacgtagtaatccacgtcctcgtcaaagctcttaataatccaggtcgccaggataccgacgaagcttgcaatcgccatccaccagatatgccagatcattgcgaaaccaaacaccgttgcgaaagcagcaataacgatgcccgcgccgctgtttttcggcatatgaatctcttcatagccagccggtttcttatacgcgtcgcctttttctttcatttcccagaacgcgtcacgctcgtgaacgacaggaacgatagcaaagttgtagaacggcggaggagaagaggttgcccactccagcgtacggccgccccacgggtcgccggtcaggtcacggttctgctcgcgatcgcggatagaaacgtagaactgaatcagctggcagagaataccgcaagcgatcagcgccgcaccgcaggctgcaacaaccagcatcgggtggaactgcgggtcaatctgctggctcaggcgacgggtcatgcccatgaagcccagtacgtacagcggcataaacgccacgaagaagccgatgatccagaaccagaaagcgcgtttgccccaggtttcgttcagggtgaagccaaaggctttcggccaccagtaggtcagacctgcgaagcaaccgaacaccacgccgccgatgatgacgttatggaagtgcgcgatcaggaacaggctgttgtgcagcacgaagtctgcgcccggtaccgccagcagtacgccggtcataccccctacggagaaggtcacgataaagccaatcgtccacagcattgctgagttgaagacgatacggccctggtacatggtaaacagccagttgaagatcttaaccccggtcgggatagcgatgatcatggtcgtaataccgaagaaggcgtttacgttcgcgcccgcacccatagtaaagaagtggtgcagccaaacgatgaacgacagaacggtaatacacactgttgcccataccagcgaggtgtagccaaacagacgcttacgcgagaaggttgcggcgatttcggagaagacaccgaataccggcagaaccagaatgtacacttccgggtgaccccaggcccaaatcaggttgatgtacatcatcatgttgccacccatatcgttggtaaagaaatgggtgcccaggtagcggtccagggtcagcagcgcgacggtgacggtcagaattgggaaggaggcgataatcaggatgttggcgcacagagatgcccagctaaacaccggcatcttgaacatggtcatgccaggggcacgcatcttgataatcgttacgaagaagttaataccggtgagcgttgtaccaataccggatagctggagagcccagatccagtaatcgaccccgacgcccggactgtactcaattcccgagagcggcggataggccagccaaccggtctgcgcgaattcaccgacgcccagagagaggttaaccagaatcacgcccacaacggtgaaccagaagctcaggttgttaaggaatgggaaggcaacgtcgcgcgcgccgatctgcagcggaaccaccaggttcatcagaccgataacaaacggcatcgctacgaagaagatcatgataacgccgtgggcggtaaagatctgatcgtagtggtgaggcggcaggaagcctgcttccccggccgaggccagcacctgctggctacgcatcataacggcgtcagcgaagccacgcagcaacatgacgattgctacgataacgtacatgataccgagacgtttgtggtcaaccgaagtcagccactcattccaaaggtaggaccacttaccgaagtaagtgatggccgccagaagcgccagtcccccaatgataattgcagccaccgtaaccacaataatgggttcatggtagggcactgcatccagtgtaagttttccgaacatcgttttcttcctcggccccttagtgagcggtttccgcgtggctcatgtccatgccttccattccttcgtgcgctgcgtgctcgccctcaggttgggtcatatccatgctcttaccgtgagacataaatttgttaataacatctttaaacaaatctggtttcacgttagagaagtattccactttgttgtattcgctaggcgcagccagtttgtcgaacgtttccatggagtccatggcgttcgcagactgtttggctttcgctacccactgatcgaaggttgcacgatccggcgtggcgatagctttgaacttcattcctgagaagcccgggccgctatagctggcggagataccgtcgtaagtaccagcttcgttcgcgatgaggtgcagctgagtctgcatcccggccattgcgtaaatctggctacctaaacgtgggataaagaacgagttcatcacggagttggaggtcactttaaagtgtaccggtacgttcgccgggaaggcgatttcgttgacggtagcaatgccttgttccggatagatgaagaaccatttccagtccatcgaaacgacttcgatagtgataggtttctcatcgtgagcaagcggtttgctcggctctaatgcgtgagtggttttccaggtcagaacggccaggaacaggatgatcaggataggaaccgtccagaccacagcttccactttgttggagtgtgaccagttcgggctatacttcgcatctttattgctcgcacgatacttccaggcaaatcctactgccatcaagacggctggaataacgacgatcatcatcaggccgaaggccgtcagaatcagagagcgttgctccagtccaatctgtccttttgggtcgaggagtgcagaatcacaaccactgagtaatacagtgcctgcgattaatgacatccatcccaaacttttattgtatttcctaagtctcattgaacgacctcaattccacggaatctggtggcgcttaaagtgtacgggcattttacgggaaggttgcattactgtaaacatagttggagctgtgtctgctctatgttagcggcttctgcttgccctgtcacatatgttacggagtgtgacattatcgcttgcaaaccttgatttaggcgggattgataacgaaagggataagaacgaaaggctttataagagaatgagcataactacccgcaaaacaacacaaataattaacaattaattatcaaataaaagacatcgtaaaagcggaaaataaaacctgcaaagctgaatcggttaaattatttaaagattcgcataaaaattgtcaataatttccagaaatctaaaacgcacaaaacaacaaatcggctacgatgaatataaaatcgttaataagacgttataattacgtttggtaattacaacgtccacgtacgtttctgcgctgatttaaatcagctcggttttacgtaatgccagatagtcaaggaaggcgccgagtaaaatacccgcaatggcggtgagcacagcgatctcaagcaggctggcaaggaaggagaaattggtgtaatccagcgcgttgagcgtcagcagcagcagccatatcgccagcatcaggcagccagcagccagaataatcaatgccagcccgtaggtttgtggaaagcgcgtgcggggcataaagctttctgagcgctgggtgtgttccagcgtacgccggcaaattaacagcagcacaatccccggtaccgcggcgacgacggaaaagagatagaaagtaggccagccgtgggcttcaacaaaccagccggcgatggggccaacatacacgcgcccaacggcagagagggctgagagcagggcaaactgggtggccgaaaacgatttattgcacagcgtcatcagcagcgcgacgaacgccgcggtgcccatcccgccgcacagattttcgaaaaacaccgccgtcgccatggagaaaaggtgcttatcggtaattgagagcagccaatatccggcgttggataccccctgcagcaggccgaaaatcagcagcgcgcggaacaacgtcaggcgctgcataagcacgccgccgtaaagcgcgccgacaatcgtggcgaacaggccgagcgttttattcaccattcccacttcacccgcatcgaaaccgacgccgcgaatcaggaacgtggtggtcaggctcatggcaaacgcgtcgccaagcttataaaggacaatcagcagcagaatgagccaggcattattgcggccgaagaagtcgcgcagcggtgcggcaacggcctgctccagcgttttcggcaccggaataacgtcgctgggttccggcgccagcagcgtggcgataatgcaggggatcagcagcgcggccatcagccagtacatcccttgccaacccagccagcgatcggccagccagagcgccagcccgccggagaccagcatccccagacgatagcccagcacgctgattgccgctccggtgccccgctcttccgcggccagcacgtcagttttccacgcgtcaaacacgatatcctgcgaggcggaacaaaaggcgatgaccaccgccagcgccgccatccagcgcagctgcgtggacggttcaaggaaacccatcgccgcaatggcgataaggagcagaaactgggtcgccagcagccagccgcgacgacggccgagaaacggcggcgtatagcggtccatcaccggcgaccagaggaacttaaagacgtaggcctggccgacgagcgagaaaaaaccgatagttttcagatcgatgttttcaacggtcatccacgcctgcagcgtgccggaggtgagggcgagcggtagtcccgaggcaaaaccgaggatcagcaggatagctgattttggctgcgtgaaaatgcgtaagtaatgattagacatggcatgtcgtgcagacccggcgcgaggccgggtctgcgacttcaattaacgcgcgttttgcttgatgaaatcgtgaatgctggtgtcctgcgccatatcgctaatggtatcggtcatgacgctattaaccgcatcggcgatatttttattcgaggcctggaaggcgccttcaacagagtagctggcacgatagtttttcgtcatcttattgccgttggcggcagtggcaacgatcgcaatatcggctttggtcgcaatgttgtaacgcacgttaccttgagaaacgtcggcgtacagtttattcacgatgatttgcagatccacggcgccgttcgggccaatcatatagccacgcgaggtcatctgtttctcgagcacttcctgcaacaggaagcgcaggtcgcgggaagcggtgagcgtaacctgttggttatcgcgggtgactttcgccagcgcctgatccggacgctgatcggcgccgttaatgctgacggtcacgcccatcagactgggatcctgctgcggcagggtgattttcggtgaaacatcgatggtagtcggcggagtggcgcatccggccagcataaacagcgcgaccaaaggaaaaagaattttcttaaacatgttcagggtctcaacgcatggtggagtggtaatgaggaaaattcccgccatcataacatcgccaacggcaaggggaagtggcaacgcatgtaaattcatcgccttgtgcgttttctgtcctgactgcatctcttatcgcaacgcaggcagggctttcaggacaccgaaccactaaagccgatacttttgcatgaaaatatcagaggaatgctaattttttgttgttttcgcccaatggaagcggtaaaagcggctaacatttaaagggaatggcggcaatacagcgttgtcggaggagaaaattcatgatgatacgtgaacagatcgaagcaaaacttagggcagcgttcgacccggtgtatcttgaagtcgtggatgaaagctatcgccacaacgttcctgcgggctctgaaagtcattttaaagtggtgttggtgagcgatcgcttccttggcgagcgttttcttaatcgtcaccgtatgatttacggaacgttgactgaggaactatcaagcaccgtgcacgctctggcgttgcatacctatacaatcaaagagtgggaagggctacaggataccgtctttgcttctcctccttgtcgcggggctggaagtatcgcgtagaaatcgcatttgcaaccgctggagcttttccagtatgttgcgtgaagatttatgagaaaacggcctgcgggccgttttgttttgcctggaaaatgtgcaattcacgcatatttacaggcaaatttgctcgggaaatgtgaaaaaagccgcagcagtgggcgacaaccgttctcgactcacaaaagtgatgccgctataatgccgcgtcttttattatgaatgtcttcgggatgattctgacgacagggaatgtgtttctgatttgaagagggcatcccggttctgcgaagcaacctgttcgcgcttccagagttgaccgagcactgtgatttttttgaggtaacaagatgcaagtttcagttgaaaccactcagggccttgggcgccgtgtaacgattactatcgccgctgacagcatcgagaatgctgtcaaaagcgagctggtcaacgtagcgaaaaaagttcgcattgacggcttccgtaaaggcaaagtgccgatgaatgttgttgctcagcgttatggcgcatctgttcgccaggacgtgctgggtgacctgatgagccgtaacttcgttgacgcgatcatcaaagaaaaaattaatccggccggcgcgccgaactacgttccgggcgaatacaagctgggtgaagacttcacctacgcggtagagttcgaagtttatccggaagttgaactgcagggtctggaagcgatcgaagttgaaaaaccggttgttgaagtgaccgatgctgacgttgacaccatgctggatactctgcgtaagcagcaggcgaactggaaagacaaagacggcgctgttgatgcagaagatcgcgtgaccgttgatttcaccggttccgttgacggcgaagagttcgaaggcggcaaagcctctgacttcgtactggcgatgggccagggtcgtatgatcccgggctttgaagacggtatcaaaggtcacaaggctggcgaagagttcaccatcgacgtgaccttcccggaagagtaccacgctgaaaacctgaaaggtaaagcagctaagttcgttatcaacctgaagaaagttgaagaacgtgaactgccagagctgactgaagagttcatcaaacgtttcggcgttgaagatggttccgtagccggtctgcgcgctgaagtgcgtaaaaacatggagcgcgagctgaaaggcgccgtgcgtaaccgcgttaaatctcaggctatcgaaggtctggttaaagctaacgatatcgacgttccggctgcgctgatcgacagcgaaatcgacgttctgcgccgtcaggctgctcagcgtttcggcggtaacgagaaacaggctctggagctgccgcgtgagctgttcgaagagcaggctaaacgccgcgttgttgttggcctgctgctgggcgaagtgattcgtaccaacgagctgaaagctgacgaagatcgcgttaaaggcctgatcgaagagatggcttccgcttacgaagatccgaaagaagtggttgagttctacagcaaaaacaaagagctgatggacaacatgcgcaacgtcgcgctggaagagcaggccgttgaagccgtgctggcgaaagctaaagtgtctgaaaaagccacttccttcagcgaactgatgaaccagcaggcgtaatttcgccccaaggtttaaggtttgagcaaaaacccgttgccgaaaggctgcgggtttttttattgcaatgatagccttaggatgagtgcgaaaaggcgatttcagtgatagcgttacgacaaaagattgttatgcttgaattatggcaacgtcatccccataaccgggagacgtaactgcattggcataatcatgcgccgtaatgaagcgtgcatctatgcacttctgcccgacggcagaaattctggctgataatccgtccgtaaggttacaatcagtgcagcggtttttttcaaattaatccaggagacggaaatgtcatacagtggcgaacgagacaactttgcaccccatatggccctggtgccgatggtcattgaacagacctcacgcggcgaacgttcatttgatatttactcccgtctgctcaaggagcgcgtcatttttctgaccggccaggtagaagaccacatggctaacctgatcgtggcgcagatgctgtttctggaagcggaaaacccggaaaaagatatctatctgtacattaactctccgggcggggtgattaccgccgggatgtctatctatgacaccatgcagttcatcaagcctgacgtgagcaccatttgtatgggccaggcggcctcaatgggcgcgttcctgctgaccgccggggcgaaaggcaagcgtttctgcctgccgaactcccgcgtgatgattcaccagccgctgggcggctaccagggccaggcgacggatatcgaaatccacgcccgcgaaatcctgaaagtgaaaggtcgcatgaatgaactgatggcacatcatacgggtcaatcccttgagcagatcgagcgcgataccgagcgcgatcgcttcctgtctgcctcagaagcagtggaatacggcctcgttgactctattttgactcatcgtaattgatgccccaggcgcaagggtgccgctatacttgtttgaaagagggcggcacaacgcttcacagcggtttgcgcctgagaatggcatttgcgtcgtcgtgtgcggcacaaagaacttaataagaggtttggactcatgacagataaacgcaaagatggttcgggcaaactgttgtactgctctttttgcggcaaaagccagcatgaagtgcgtaagctaatcgccgggccatccgtgtatatctgcgacgaatgcgttgatttatgtaacgacatcattcgcgaagaaattaaagaagtcgcgccgcatcgcgagcgcagcgcgctgccgacgccgcacgaaattcgccatcatctggacgattacgttatcggccaggagccggcgaaaaaagtgctggcggtggcggtatacaatcactacaaacgtctgcgcaatggcgataccagcaacggcgttgagctgggcaaaagtaacattctgctgatcgggccgaccggttccggtaaaacgctgctggcggaaacgctcgcgcgcctgctggatgtgcctttcaccatggcggatgccaccaccctgaccgaagccggctacgtgggtgaagacgttgagaacatcatccagaagctgctgcagaagtgcgactacgacgtacagaaagcccagcgcggtatcgtctacattgatgaaatcgataaaatttcccgtaaatcggataacccgtcgatcactcgcgatgtttccggcgaaggcgtgcagcaggcgctgctgaagcttattgaaggtaccgttgccgcggttccgccgcagggcgggcgtaagcatccgcagcaggagttcctgcaggttgatacctctaagatcctgttcatctgcggcggcgcctttgccggtctggataaggtcatttcccaccgtgttgaaaccggttcaggtattggtttcggcgcgacggtcaaggcgaagtctgacaaagccagcgaaggcgagctgctgtctcaggttgagccggaagatctgatcaagtttggcctgattcctgagttcatcgggcgtctgccggttgtggcgaccctgagcgagctgagcgaagaagcgctgattcagatcctcaaagagccgaaaaacgccctgaccaagcagtatcaggcgctgttcagcctggaaggcgctgagctggaattccgcgacgaagcgctggacgctatcgctaagaaagcgatggcgcgtaaaaccggggctcgcggtctgcgttctatcgttgaagccgcgctgctcgataccatgtacgatcttccgtcaatggaagacgtggaaaaagtggtcatcgacgcttcggttatcgatggccagagcaagccgctgctgatttacggcaaaccggaagcgcagcaggcatctggtgaataattaaccattttgctcaagcagttaacaaaaaggggggattttatctccccttttatttttcctgcattcccgccgttgaatgtatggaatacatccccatatactggtttacatattaacggcgacgcgtcgttgagttgcgtcgtcggctacctggcggactttaaactaagagagagctctatgaatcctgagcgttctgaacgcattgaaatccccgtattgccgttgcgcgatgtggtggtttatccgcacatggtcatacccctgtttgtagggcgggaaaaatctatccgttgcctcgaagcagccatggatcatgataaaaaaatcatgctggttgcgcagaaagaagcctcgacggatgagccgggtgtaaacgatcttttcaccgtcgggaccgtggcgtctattttgcaaatgctgaagctaccggacggtactgtcaaagtgctggtcgaaggtttacagcgcgcgcgcatctctgcgctgtctgataacggcgagcatttttcggcgaaggctgaatatcttgaatcgccggcgattgacgaacgcgagcaggaagtgctggttcgtacggccatcagccagtttgaaggctacatcaagctgaacaagaaaatcccaccggaagtgctgacgtcgctgaatagcattgacgatccggcgcgcctggcggataccatcgctgcgcatatgccgctgaagctggcggacaaacagtccgtgctggagatgtccgacgttaacgaacgtctggaatatctgatggcgatgatggagtcggaaatcgatctgctgcaggttgagaagcgcattcgcaaccgcgtgaaaaaacagatggagaaatctcagcgcgagtactatctgaatgagcaaatgaaagccattcaaaaagagctcggcgagatggacgacgccccggacgagaacgaagcgctgaagcgtaagatcgacgcggcgaaaatgccgaaagaggcaaaagagaaaaccgaagcggaactgcagaagctgaaaatgatgtccccgatgtcggcggaagcgaccgtcgttcgcggctacatcgactggatggtgcaggtaccgtggaacgcccgcagcaaggtcaaaaaagacctgcgtcaggctcaggagatcctcgacaccgatcactacggccttgagcgcgtgaaggatcgtattcttgagtacctcgcggtgcagagccgtgttaacaagctcaaagggccgatcctgtgcctggttgggcctccgggggtcggtaaaacctctctcggccaatccatcgccaaagccaccggacgtaagtacgtgcgtatggcgctgggcggcgtgcgtgatgaagcggaaatccgcggtcaccgtcgtacctatattggctcaatgccgggcaaactgatccagaaaatggccaaagtgggcgttaaaaacccgctgttcttactggatgagatcgacaagatgtcttcggacatgcgcggcgatccggcctcggcgctgctggaggtgttggatccggaacagaacgtggcctttaacgatcactatctggaagtggattacgatctcagcgacgtgatgtttgtcgcgacctccaactccatgaacattccggcgccgctgctggatcgtatggaagtgatccgtctctccggctacaccgaggatgagaagctgaacatcgccaaacgccacctgctgtcaaaacagattgagcgtaacgcgctcaaaaaaggcgagctgacggtggatgacagcgcgattatcggcattatccgctactacacgcgtgaagcgggtgtgcgtggtctggagcgcgaaatctcgaaactgtgccgtaaggcggtaaaacagctgctgctggataaatcgctgaagcacatcgagattaacggcgacaacctgcatgacttccttggcgtgcagcgctatgactatggccgggcggatagcgaaaaccgcgtgggtcaggtgacgggtctggcgtggacggaagtgggcggcgatctgctgaccattgaaaccgcctgcgttccgggtaaaggtaagctgacctataccggttcactgggtgaggtgatgcaggagtccatccaggctgcgctgaccgtggtgcgttcgcgtgcggataagctgggtatcaactcagacttttacgaaaaacgcgatattcacgtgcacgtaccggaaggcgctacgccgaaagatggcccaagcgcaggtatcgcgatgtgtaccgcactggtttcctgtctgacgggcaatccggtgcgcgccgatgtggcgatgaccggggaaattaccctccgtggtcaggtgttgccaatcggtggtctgaaggaaaaactgctggccgcgcaccgcggcggcattaagactgttctgattcctgatgaaaacaaacgtgaccttgaagaaattccagataacgttatcgccgatttagatatccatccggtgaaacgaatcgaggaagttctggcacttgcactgcagaacgagccgtttggtatggaagtcgtcacggcaaaatagtgatttcgcgcaaattgcgctaagaaaaatagggctggtaagtaaattcgtacttgccagcctttttttgtgtagctaacttagatcgctggcaggggggtcaattacaactctgttgtaagggcatgacagtcctgatataactgctgcgcggtcgcgccacgaaggattctggtgcgatataaattataaagagaggaagagaacagtgaataaatctcaactgattgacaaaattgctgccggtgcggacatttctaaagccgcagctggacgtgcgttagatgctttaatcgcttctgttactgaatctctgcaggctggggatgacgttgcgctggtagggtttggtacttttgctgttaaagagcgcgctgcccgtaccggccgcaatccgcaaacaggcaaagaaattaccattgctgctgctaaagtaccgggtttccgtgcaggtaaagcgctgaaagacgcggtaaactgatcgacttccccactggggtctgtgacgaagtacaagggcgcatcgtaagatgtgccttttttatttgccagaatgagacttaatgtgactttatacgcacttgtgggctgacaatcaccccgttttcttgtcaaaatacgtcctcacgcgcggcggccatcacatgctatgctgcgcgagctaaagtcatctacagcggagcgttgttacaccatgatggacaacctacgcacggccgccaacagcgtcgtgctcaagattattttcggtatcattatcgtctcgttcattttgaccggggtgagtggttacctgattggcggtggtaacaactatgccgcaaaagttaatgaccaggagattggtcgcgcacagtttgaaaatgccgttgccagcgagcgtaatcgcatgcagcagcagcttggcgaccagttctcagaactggcggccaatgaaaattacatgaagaccatgcgtcagcaggtgctgaaccgtctgattgacgaggcgctgctcgatcagtatgcccgtgagctgggtctcaacatcagcgacgaccaggtgaagcaggctatcttccagacccaggctttccaggcggatggcaaatttgataacgagcgcttcagccgtattgttaatcagatggggatgacgacggatcagtacgcgcaggcgcttcgtaatcagctgacgactcagcagctgatcaacgccgtagccggtaccgactttatgctgccgggcgaatccgaccagctggcggcgctggtttctcaacagcgcgtcgttcgtgaagcgactattgacgtaaacgcgctggcggcgaagcaaaccgcaaccgacgatgaaatcaacgcgttctaccagcagaaccaggcgcgttttatggcgcctgagcagttccgcgtcagctacatcaagctggacgctgccagcatgcaggaaaacgtctctgacgaagaaattcagtcatggtacgaccagcatcaggatcagttcactcagccgcagcgtaaccgctacagcatcatccagaccaaaaccgaagcggatgcgcaggcggtgcttgatgagctgaagaaaggcgctgacttcgccacgctggccaaagaaaaatcaaccgatattatctctgcccgcagcggcggtgatatggggtggctggaagatgcggcgaccgtgccagagctgaaagaggccggtctgaaagaaaaaggccagctttctggcgtaattaaatcctccgttgggttcctggttgcccgtctggacgatgttcaggcagcacaggttaaaccgctggctgaggttcgcgacgatattgcggcgaaagtgaagcaggaaaaagccctggatgcgtactatgccctgcagcagaaagtgagcgacgcggcgagcaacgataacgagtcgctggcgggcgcagcccaggttgccggtcttaaagtggttgaaaccggctggtttggccgcgacagcctgccgcaagagctgaatttcaagccggtctctgaagctatcttcaacggcggcctggtgggcgagaacggcacgccgggcagcaactccgatatcatcaccgtcgacggcgatcgtgcgtttgttctgcgcatcagcgagcataaaccggaagcggtgaaaccgctggcggatgtaaaagcgcaggtgagcgatattgtgaagcacacgaaagcggaacagcaggcgaagctggatgccgacaagctgctgacggccctgaaagagggcaaaggcgatgaagcgatgaaagccgcaggcctgagctttggtgcgccgcagacgctgtcacgcaccggtcaggaagcgctgagccagtccgtctttgcacttccgctgccgcaggcgggtaagccaagctacggcgtgggctccgatctgcagggcaacgtggtgctgctggcgctggacgaagtgaaagcgggtacgatgccggaagagcagaaaaaagcgatgattcaggggatcacccagaataacgcccagatcgctttcgaagcgctgatgagcaacctgcgtaaagcggcgaaaattaagctcggcgacattatcgatcagcaacaataattacgtgctgcttcgcaaaagcaagtaacgtgatgtcattctcaaaggccgctttcgcggccttttccatttctgcattttgccttttgtactcttttcccttcgtcgctatcgtgaccttgctgtctacaaacaaggagataacagcatgaaacgaggaatgaaaacgcttattgccgccgtactggtttgcgcggcggggagtcagatagcgcaggcggcgccttctgccggcaaagcgtcggcgccggtaaaggaaagcgtgcagtcgccgcagtcaaaagcgccggatgcgttaaatgcggcggatagtgaaggcaccagggtgagtatcaataacgccagcgcggaagagctggctaaggcgctgaatggcgtcggcctgaagaaagcgcaggctatagtgagctatcgcgaagagtacgggccatttaaaaccgttgacgatcttaagcaggtacccggaatgggcaactcgctggtagagagaaatctgtcacatctgaagctgtaaattttcagcgaaagtttgcacagtcgtcattatttgccagactgaagaggtcatgccagtggtgtgacctctgacctcaaaacaacaattaaagataaggcatttgcgctatgcagacacaaatcaaagttcgcggctatcatctggatgtctatcagcacgttaacaatgcgcgttatctggagtttctcgaagaagcgcgttgggatggcctggaaagcagcccggccttccactggatgaccgctcgcaacatcgcctttgtggtggtcaatatcaatatcaactaccgccgaccggcggtactaggcgatgtgttaaccgtcaccagcaagctcgaacagctgaacggaaaaagcgggacgttaagccaggtagtcaccctcaaccctaacggcgaagtggtcgccgatgcgcttatcacttttgtctgtatcgatctaaaaacgcagaaagcgctgccgcttgagggcgaactgcgggagaagctggagcagcttgagcctcgctaacaggccagccggagggggatgtcccggaggcggtgctgcgcacctgtccgggctacgtttcctcagctgtctgcgattcggtagcgcgggctacgcgtcctcagcagcctgcgatccggtagcccgggcaggcgcatcgcgccgtccccgggagcaagcgcacagaaagtggcagtacttccccgaaggcgctgctgcgtatctgaccgggctatgcatcgtaagtcgcctgcgatcccgccacgccgccgggaagtaaccggttactggagcccggttttctgcttcatcaccgtcatcaccccaaccttatcgcccagatactggctcagcccgttggcgcggaggttacaggcggcgcactgcccgcagccgtcgcctttaataccgttatagcaggtgagggtttcatggcgcaccaggtcgagctggccccagtaatcggccagggcccacgtttcggctttgttaagccacattagcggcgtctcaaagcgaatatctttcgccataccgaggctgacggcatggtgcagcgctttcacgaactcgtcgcggcagtccgggtagcccgaaaagtcggtctcgcaaacgccggtgataatggcttccgccttcacctgatacgcgtaaatggccgtcagggttaaaaacagaatgttgcgcccgggtacgaaggtattcgggatgccgctggcgtccggttcataatccggaaccggaatgctatcgcgggtcaggctgctgaccgccagttcgttaagcagggtgacatcaaggactttatgggccacggcccccagctttagcgccagttcgcgagcaacgtcaatctccgcgcgatgacgttggccataatcaaaagtgacgcaatgcacttcatcatactgttgcagagcctgcaccaggcaggtcgtcgaatcttgtcctccgctgaagacaactacggcgcgtttcatggtaattcctgacaatcgaagtgaggcgcatatggtagcgcctgatgaacgtgaccaccagccccgtcacggcgcagaggccggtagccaggcgctggcgaaatcaaaccagccgcgcgcgttcagccgtagtccgttgacccccggcggcgcgctgatgcgataattataattgaacagcggcgtcatgatggcatcgtccatcagactgttaaagacgttgcgcaacgcttcgctacggctgcgttcgtccggtaaggcctgaacggcatccagcgtcgcctggagatgcgcatattgcgccccggtcagcaaattaggccacagcacgtcgcagcgtagccactgctccagcgcatagaccggcgcttcgccaatcaggcggtcgcccatcatcaggtccgcctgtgcaaactgctggcagccatcccagtttttcgcatcatggaaaataatcgtcagctcacagcccagctccgccagccgttgacgaagccgatccgccatggcgtgtagctctacggggaggtgatagagcagcgtaagccgttcgggcagaggggtatcatgattttcaggccactgcggaatagaccagcccggcaatacttcgttgctgggcgcgatcagatcctcatccagcggcagggtttctaacagggtggagcgatgaatcagcgagaccagcctttgcgcctgcgctttgttaagacgagggctctggcgcagcgtcagatagcaaaagccgaggctaatactgttgctgacctgacgtagtctggtcagttcgtcaggatcgccaatggttatctgtaccggatgacgacagctggtgcccagatcctgctcgaacagctgcggcgtgatccagtattccacggcctgcagcagcgggtgagtgagatgatagcgctgatggttttccagccgcaccaggtccggagtaaatcgcttcaggcgaaacggtccgctgccgatcgccggatcgtcaggatgcgccagcacgctgcagtagctggcaaggcggaacggcagccaataatcggcgcgatgcagggtgatagtcagacactgggagtgggtgacgctaatctcgctgatactggcgaacagcgtgcgcagcgcgggcagctgcagcagcatcaggagccgctgctgcagctgtgaggttttaatcggatcgccgttgtgccagaacagggtagaacgaatataaaagtgccagcgcaggccgtcaggcgacacctcccagtgatgggctaaatcgcctatcggacaggtactctgcgcatcaaatcgggtcagaccggaaaatatctccccggccaggtgctgctccgcgcgtcccggcataaaacccgggcgcagcggctccagcggacggtagtaaggaatacgcagggtcggcgtattgttctgccattggccgccgagaaagggggaaagcagcgctttaagctccaccggcgccagctgggccagttcgagggcattttgctgctgccctttattcagcgcctgctccatcatctcattgcgcagcgcttccggcgctttataaaactggagtagcccgcgctttccgcgaccggagctggcctgccagcttagccagccggactcttgcgcctggcgcagcagggttcgaatgtggcgttcgctgcaaaagcagcgttcggccagctcgccgacggttacctgctgcggctctccggcggagggctgccagagtcgctggtactgatgcagacggtttaatagcctcatcgctgtgtaatcctgcgtagattgggaaacccggaacaataaaatttatctattcactattacttccgtatatctcaggcaatactgcaacacaagcaaaatccaccacgatttggggagcagaagatggcaagactggctgcattcgatatggacggtacgctactgatgccggaccatcgtctgggagaaaaaacgctttcgacgctcaaacgtctgcgcgatcgcgacatcaccctgactttcgccaccggtcgtcatgctctggaaatgcgccacgttatcggcgagttctctctggatgcgtttttaatcaccggcaacgggacgcgcattcactctctggaaggtgaggagctgtatcgccgcgatctggctcccgatgtggcggaagaggtgctgcacagcgcctgggaaaccacggcaagtatgcatttctttaacgacggcggctggtacaccgggcaggcgatcccggaattactgaaagcgcacgtctttagcggttttcgttatcagctgtacgatccaaagcggatgccggcgcatcaggtcactaaaatctgcttctgcggcgatcatgacgatttgcggcggctaaggcttcaactgagtgaagcgctgggcggccgcgcggatctctgtttttcggcgatggattgccttgaagtgttgcctggcggctgtaacaaaggcgcggcgctggcggtattaagccagcatctggggctgacgatgcaggattgcatggcgttcggtgacgccatgaacgacctggaaatgctcggcagcgtcgggcgcggcgtgattatgggcaatgcgatgaatcagctgaaagcggaactcccacatctaccggttattggcgactgccgtcatcaggccgtctcccactttttgactcattggctggataatcccgatcttccttattcccccgaataaagagaccctgccagcaagccagatatcctgtgatacctggcttcttttattttgcctgcagcatgtcggcgatttgtgcctgccatggggagatatcgccaatattggccgctacccactgcgggttgtagtaggtttccagataacgttcaccgctgtcgcacagcagcgtgacgagagagccggtgcgcccctcttcgcgcatccgcacggccagctgcagtacgccccacatgttggtgccggtggaggcgccgaccttacgtccgagcagcgtttccagccatagcgcggtggcgacgctggcggcatccggtacccgcagcatctcatcgaccacgtcgggaataaacgacggttcgacgcgcgggcggccgatgccctcaattttactgccgaccgggctgcgcaggctggcgtcgcggctctgccagtagtccataaacaccgagttttgtgggtcaaccaccagcagctgcgtatcgtagccctgacaacgaatgtagcgtccgatggtggcagaggtgcccccggtgcccgcgctcatcacgatatacgacggctgcggatgcggctcgtggttcatctgacgaaagatactgtcggcgatattattgtttccccgccagtcggtcgcccgttcggcataggtaaactgatccatataatggccgttcagctcgcgggccagggtttcggaggcggcatagatttcgcaggcgctatcgacgaagtggcagcggccgccgtagaactcaatttgttcaattttacgttttgccgtacaggaaggcatcacggcgataaactgcaggcccaagagacgggcgaagtaggcttcagagacggcggtcgaaccggaagaggattcgataatcgttgtcccttctttaatccagccgttgcacagaccatagagaaacagcgagcgggccaggcggtgcttcaggctaccggttggatgggtgctttcatccttcaggtagagctggatccccgggaaccccggaagcgccagacgaataaggtgcgtgtcggcggaacgctgataatcggcattaatttcactaatcgcgtgtttaacccaggcgctgttcatctcaaattcctgtttgtcattttgtgcccagcttagcggaaatagaaggaaaaattgttgccatttagcctttcaattacaatgaatggagtaaatttttctcccaaggtgccctatgttagataaaattgaccgtaagctgctttctttactgcaaaccgactgcaccctctctttgcaggcgctggccgatgccgttaatctgaccaccacgccctgctggaagcgcctgaagcggctggaagatgaaggtattctgcgtgggcgcgtcgcgctgctggatgcggaaaaggtcgggcttgggctgacggcgtttgtgctgattaagactcagcaccacagtagcgactggtattgccgcttcgtcagcgaagtcacgcagatggcggaggttcttggtttctggcgtatggcgggggagtatgactatctgctgcgggtccaggtggcggatatgaagaactacgatgatttttataaacgcctggttaacagcgtgccggggctctcggatgtgacttcgagttttgccatggaacagataaaatacaccactgccttgccgattgattaacggcatcagccgctacgaattacacactcaggatttaactgcttgcgattatttgcccaacttagctggtatttccgccgggagtggcgtcgttacctcggcgctattgctctgctgatcgtcattgccattctgcaactggtgccgccaaaggtggtgggtatcgtggttgacggcgtaacaaaacaacattacaccgcggaaaaggtgtggatgtggatcggcctgctggtcgttattgcagtgatggtctatctgctgcgctacgtctggcgcgtattgcttttcggcgcctcttatcagctggccgtcgaactgcgcgaggatttctatcgccagctcagccgccagcatccggccttttacctgcgccaccgtaccggcgatctgatcgctcgcgccaccaacgatgtggatcgggtggtgttcgccgccggcgagggggtattaaccctggttgactcgctggtcatgggctgcgcggtgctgattgtcatgtcgacgcaaatcagctggcagttaactctgctggcgctgctgcccatgccgctgatggcgctggcgattaagcgtaacggcgatgcgttacacgaacgctttcgcgtcgcgcaggcggccttctccagcctcaacgaccgcacccaggagagcctgaccagcatccgcatgatcaaagcctttggcctcgaagaccgacagtcggcgctgtttgccgccgacgccgcggataccggggcgaaaaacatgcgcgtggcgcgtatcgacgcccgctttgacccgacgatttatatcgctatcgggaccgctaacctgctggccatcggcggcggcagctggatggtgatccagggcagcctgaccctgggtcagctcaccagctttgtgatgtacctcggcctgatgatctggccaatgctggcgctggcgtggatgtttaacatcgttgagcgcggtagcgcggcctatgcgcgcattcgcaccatgctggaggaagcgccggtggtgaacgacggcagcgagccgacgccggaaggccgcggtgcgcttagcgtcgccgtgcgcgagtttacctacccgcaggcgaacaaggtctcgctggaaaaggtcaactttacgctccagcccgggcagatgctggggatttgcgggccgaccggctccggcaagagcaccattctggcgctgattcagcgccactttgacgtgactgaaggcgatatccgcttccacgacgttcccctgacccggctacagctggatagctggcgcgcacgtctggcggtggttaatcagacaccgttcctgttctccgataccgtcgccagcaacatcgccctcggtaaaccggacgccacgcaggagcaaatcgagcacgttgcgcggcttgccagcgtgcatgaggatatcctgcgcctgccgcaggggtataacaccgaagtcggcgagcgcggcgtgatgctttccggcgggcaaaagcagcgaatttccatcgcccgcgcgctgctgctggaggcggagattctgatccttgatgatgcgctgtcggcggtggacggcagaacggagcaccagattttgcataacctgcggcagtggggagaggggcggacggtgatcattagcgcccatcgcctgtcggcgttgaccgaggccagcgaaattctggtgatgcagcacgggcatattgcccagcgcggtcgccatgaggcgctggcggcgcagccgggctggtatcgggatatgtaccgttatcagcagctggaagcggcgctggatgatgtcccgcaggaagataaggaggtcgccggtgcgtagtttcactgaactctggccgacgttaaagcgcctgctggcctacggctccccgtggcgtaaaccgctgatgatagcggttgccattatgtgggttgcggcggtcgcggaagtcagcggcccgctgctgatcagctatttcatcgacaatatggtggcgaagaactcgctgccgttgaagctggtctgcggcctcgccgcggcctacattggcctgcaactccttgccgctggcctgcattactgccaggcgctgctgtttaatcgcgcggcggtcggcgtggtgcagcagctgcgcagcgatgtgatggacgccgcgctgcgtcagccgctcagcgagtttgatacgcagccggtcgggcagctcatctcgcgggttaccaacgataccgaagtgattcgcgatctctacgtgaccgtggtggcgaccgtgctgcgtagcgccgctttgattggcgcgatgctggtggcgatgttcagccttgactggcggatggcgctggtggctatcgctattttcccggcggtgctgatcgtgatgatgatttatcagcgctacagcacgcccatcgtcaggcgggttcgcgcctggctggcggacatcaacgacggttttaatgaagtgattaacggcatgggcgtcatccagcagttccgccagcaggcgcggttcggcgagcggatgcgcgaggccagctacgcccactatctggcgcgtatgcaaaccctgcgtcttgatggcttcctgctgcgcccactgctgagcctcttctcttcattaattctctgcggcctgctgatgctgtttggtttcagcagcagcggaacgatcgaagtcggggtgctatacgcctttattagctatcttgggcgactgaacgagccgctgatcgagctgaccacccagcagtcaatgctgcagcaggcggtcgtggcgggcgagcgcgtcttcgagctcatggacaaaccgcgtcaggcgtggggtgaggatagcgagccgctgcgcagcggggcgatgagtatcgatcacgtctcttttgcctaccgcgacgatagcctggtgttgcaggatattaatctcgatatcccgtcccgcagctttgtggctctggttggtcataccgggagcggtaaaagcaccctggccagcctgatgatgggctactacccgttaacccagggagagattcgcatcgacggtcgtccgctttcttccttaagccacagcgcgctgcggcaggggattgcgatggtgcagcaggatccggtggtgctggctgacaccttctatgccaacgtcaccctcggtcgcgacatcagcgaagagcaggtgtgggaagcgctggaagcggtacagctggcggcgctggcccgtgaaatggaaaacggtatttatacgctgctgggcgagcaggggaataatctctccgttggccagaaacagctgctggcgctggcgcgggtgctggtcgatacgccgcaggtgctgattcttgatgaggcgacggccaatatcgattccggtaccgagcaggcgattcagcaggctctggctcgggtgcgcgagcacaccacgctggtggtgattgcgcaccgcttatcgaccatcgtcgaggccgatacgatcctggtactgcaccgcggtcaggccgttgagcgcggaagccaccagcagctgctggcggccagaggccgctactggcagatgtatcagctgcagctggctggcgaagagctggcggccagcgcgcaggaagagtcgcttatcgcctgatgcaccataaacaggcagcggcgccgccgcggcctgaggtggtgcaaaatcgtcacaagctgcgcactgaaatggtgcagtttcaggcaaaagaggcattttgccgcttcgtttccgccgaattattctccttcctcctcaaaaagggccgcctggcggtcctttttcatttctggcatagcccttgctttattagagacgtgttagctgcggccattaccgaattctgactggaggggacttatgaagctggttaccgtggtaatcaaaccattcaaactggaagacgtgcgtgaagcattatcttcaatgggtattcagggcctgacggtcactgaagttaaagggttcggccgtcagaaaggccacgcggagctctatcgcggcgcggaatatagcgtcaattttctgccgaaagtgaagattgacgtcgcgattgccgacgatcagctggacgaagtcgtcgatgtcatcagtaaagcggcttacaccggaaagattggcgacggcaaaatctttgtcgccgagctgcagcgcgtgattcgcatccgtaccggcgaatcagacgaagcggcactgtaactttcagaccacacagtgatggggaacgaaacaatgaagatagcaacaatgaaaacaggtctgggagcgttggctctccttccggggctggcgatggccgcaccggcggtcgcggacaaagccgacaacgcttttatgatgatttgcaccgcgctggtgctgtttatgacgattccgggcatcgcgctgttctacggcgggctgatccgcggtaaaaacgttctctccatgctgacgcaggtcatcgtgacgtttgcgctggtctgcgtactgtgggtggtttatggctacacgctggccttcggcgctggcggcagcttcttcggcaacttcgactgggtactgctgaaaaatattgaactgaaagcgctgatggggagcttctatcagtacatccacgttgctttccagggctcctttgcctgtattaccgttggcctgatcgtcggtgcgctggcggaacgtattcgtttctcggcggtactgatattcgttgtggtatggatgacgctctcttatgtgccgattgcgcacatggtatggggcggcggtctgttggctacgcacggcgcgcttgatttcgccggcggtacggttgttcacatcaacgccgcggtcgcggggctggtgggcgcctacatgatgggcaaacgcgtcggctttggtaaagaagcgttcaaaccgcataacctgccgatggttttcaccggcaccgccatcctctacgttggctggttcggctttaacgccggttcagcaagcgcggcgaacgaaattgccggtctggcgttcgttaacaccgtggttgcaacggcggcggctatcctggcatggaccttcggcgagtgggcaacccgcggcaagccgtcactgctgggcgcctgttcaggggcgattgccggtctggtcggcatcactccggcctgtggctacatcggcgttggcggctcgctgattgtgggtatcgctgcgggccttgcgggtctgtggggcgtcaccgttctgaaacgctggctgcgcgttgatgacccgtgcgatgtgtttggcgtccacggcgtctgcggtatcgtaggttgcatcctgaccggtatcttcgccgcgacttctctgggcggtgtgggctacgcggaaggcgtcaccatgggccatcaggttctggtacagctggaaagcatcggtatcaccatcgtctggtcaggcgtcgtcgcctttatcggttacaaggttgccgatatgaccgttggcctgcgcgtaccggaagatcaagagcgtgaagggctggacgtaaacagccacggcgaaaacgcctacaacgcctgataaaacgagttatctcctgaagctgcagagcctcccctcggggaggctctgcttttttatgcgttgcgattacgcatgacgccttcctgcaccgtggaagccaccagcgtaccgtcctgagtgtagaactcgccgcggacaaaaccgcgcgcgctggaggcggaggtgctctcaacgctgtacagcagccagtcgttgatgttgaacgggcggtggaaccacattgagtgatcgatggtggcaacctgcatgcccggctccagaaaaccgacgccgtgaggctgcagggcaacgggcaggaagttaaaatccgaagcgtagcccagcagagactgatgggtgcggagatcttccggcactgcgccgttggcgcggatccagacctgacgcgttggttctgcaacgtgtcctttcagagggttatggaattcgaccgggcgaatctccagcggtttatcgcagagaaatttctctttgacctgcggcggcagcaggtgggccagcttgcgggcaatatccgtttcggagggaagcgcgtccggagcgggtgccgctggcatggttttctgatgttcatagccgggttctggcgcctggaaagaggcggtcatatagaaaatgggcttcccgttttgaatcgccgccacccggcgggcgctgaagctattgccatcgcgcaggacttcaacatcatagatgataggtttcaggctatcgccgggacgcaggaagtagctgtgaaacgagtgaatcaggcgttctgtgggcaccgtctcttttgccgcatacagcgcctgacccactacctggccgccaaagacctgtcgcaatcccagatcttcgctctgtccgcggaacaatccctcttcaattttttccagatttaacaatgccagcaaatgggttagtgcctgactcatagttatcctcaatcaatgatgactgcctggcgcagcgcgttattgaggcaaagtataacctggaatcgcaagtggtccgatgggttcaataatctgaatatgggctcttttccaggaagagatctgagatctgtgccacacttattcacgatactaatgtcctgtccccgattgtggctggatgtactcctgttaaagaagggatgaaaaggagaaaagaatgaaatttgcctatatgttaagtgctttagccgtagcggctacgctgtctgcctgtgcgaacaaccacaacagcaatgcagcgaaccaggcggcgcccgatccttatggcattgcctcactaagctcctcgcagcagcagcctaacgtatccgggaccatcaatattcgacagcgcgtggcgttaccgccggacgcggtattgaccgtaaccctgtcggatgcgtctctggccgatgcgccagcgcacgtgctgtcgcaaaaagcggtaaggaccgaagggaagcaggcgccgtttaactttgtcctgccctataaccaggcgcaaattcagcctaatgcccgcattcttctcagcgcggcgattaccgttaacggtcagctgatgtttattaccgataccgtgcagacggtgattaaccagggcggtaaccgggccgatctggtgctggtgccggttcagcaaacggcggtgccggtggcgaacaacagcgctcctgctgcccagtaactccccaccatgcccctttacaggggcattttttttgccttcaataaatccagcggtagtgctgcagatcaatatgtccgctgcctgaaacctggacgccttccgccagtagcgcctggcgttggcgctgcagatctggtccggtaagggagatgtcgccgtggcggttgacgacccgatgccaggggagagtcgatccttccggcaggcgctttaatactccgcccacctggcgagccgctcgcggtgaacccgccagctgagcaatgtcgccgtaggtggcaacgtatccctctggaatcgaggcgactatctgccagacccgctgcggaaaagtatcgtgagaatccatagtacgtcctgttgccggaaaaggctcaggataagcgttgtatgatgggctgtacagatagcgggtcaggccgatttaacgacggtaaattccagcgccagacccagcacctgcatgccatgaacattttcattcgccgtattgctcagcagtgtttcaagaaacttcaggcgttttgactgggcgttaatcaccagctttgcgcgcattgccggaagcttaagcgttgatatcggatacaccacgcgaccgctgacgtcgatggggagtttccgtaattcaatgtgctgaaggacgccgacagtagagtagagcagcgcgaccggggtgacggcgagcagctgattattgctaatcgtcacaaaatcgaggatgacctccggacgcagaaagtttaaaccgcggaaggaaacggtcacttcggcgatggccggcatcgccagggtagtgattaaacgcggtgattcactcattcatataccattgagacagtgcgttgattaaaaaagacggtagataagcctcattatggccgctggcgaggatttccgctgagagtgtgctcgcaatctcatcaggggatcggggccattttacgctgagaagccgctgtagacgcgactttgcgcaataaaccagcacccaatcgccggcggcttgcaattcaggggttcagcagggataatgcgccagcgcgttaggtaactagcgctctcaatgggggctctgttggttctcccgcaacgctactctgtttaccaggtcaggtccggaaggaagcagccagagcagacgacgtgtgtgccgggatgtagctggcagggcccccacccatttcagggtgccctctcgctattcgcattcattccgtggtttcccccagccttcatatttaatatccacaaatagattgtgagtatttttcgtttctaaaccctctattttttatgccaaaaaattcactacgtcataaatttgaaatttaactgaaatattattgtcatctttatgtcatatataacgtgcagattattcatgggaaaatgttgtttgatataagctaaaaatatatctctggatcagcatgttaacttcgtgtattaattatatgatgattttatttcacgggaagcgtgactatgaccactgtggttctgaacgtaaaaattgatggcgagttaaaagaaaagctgcgtcagtatgcggaagaaaataacgaaaatttaggaacagctacggagaaactgctgctgctggcctttcaggtagcggaatcagcagacgaggcgggggtttcggaagaagatatcgatagccagcataccgaagaggaagcgtctccattaacccctaaagaaatcaaagcattacgtaaaattctgaagaagaaaaaatgaaacaacaactctctacagccagcaactatagcgaagcctgcgatatgctgcgttccggatacgttaagcacgtacgcctgaactggaatatcggtagcgatgagttctttcgcattgcctccgactggtgtgacacaggggcaaaaataaaaaaagatgaagacggctttattatttctctgaaagggtttccgatcccgcgtcagcattaatgaaactattgcaattttgtcatcgggctgacacgtcagaaagacaaaattgaagcgcaattttataaaaacatctcatatgcgtcatggatgatggtttttgacgggctggctccagcccgtcgatattttcttaaatgattttcctcaggcggaagctctctttctgctcagtcaggctatgccacaacggctgcaatgtcgtaaatgcgctgcgcagttcgtcatccgaaagggtaaagggcaaacgcaaatagcgatcaaacgcgccggccaggccaaagcgagttcccgtcccgatgtgaatcccccggctttcagcgcgaacggaaaagagcgtcgccagcattcccggtaattccacccaaaaagagagtcctccctccggcggcgtaaagcgccagtggggaaaatattccgccatcagcgcgccgcacatattccggcgagtcgccagcatggcgcgccgtgacggtagcagcctgtgctcattctcaagcaaccagcagcaggccagctgttccagcagcggggagccgagatcgagagagtcgcgggcctgaaccagcgaagcaatggttcgcgaagaggcgcggatccaacctatgcgcaggccgccccagaagctttttcccgctgaaccgatggttatcaccggggcatcaggattaaatgccgctaaaggcggcggcggcggggcgtcataccataaatccaccatcgtttcgtctgccaccagcgtggtgcgggtttgtgcggcgatgtccgctacccgctggcgcgttgcgctatccatacagcggccggtgggattatgaaaatccggcatcagccaggccagacgcggagccgtttgggcaatcgttgccgccagaccgtcgcaatcccatccctgctgcggtaacgccacgctaaccggacgacatgatgcgccctgtatcgcgctaagcgccatggggtaagttggcgcatccaccaccacccgatcgccgggcccggtgaataaacgcagtaccagcgcaaagccgctaagcgccccgttgacgatcatcacttcatcgctgcgggttggcagcccgcgttcgctatagcggcgggcgatggcttcgcgcagaagcgggagcccttgttgatcgtaaccggtgttggataaatgttcaggcatgatctttaaggcctggctgtaggcctgatggatctcggggccggcgctaagggcggcaacggccagattcaccgatagcgggtccgtttgtttggccgccgcctctaccggacgctccggcaaggcgatccgcgaaccgcttccctgacggctgtagagatagccttcttcccgaagctgaccgagcgcgctggcaaccgtggtgcggctgatattcagggcagccgccagttcacgttcgccgggcagtcgcgtttccagcgccaggcggccatcgagaatgagcaggcgcagcgcttctgcaagctgacgccagataggcgtgcgagaagtggactcctgccagtgaccgagcagccgtaccagcgattgtgcaccaaagcgacgagataacatagcaatccactttttaaaaactggccattaattatcaatccatttttactgatgataaaggaaatcgcaattgccctgaggtgaaaaatggtacgtcgcttgttgcaactttacattggtctggtcctgtacggcgtgtcgaccgcgttatttgtgcatgccaatctgggggccgatccgtgggatgtttttcatctggggatcggtaagcagtttaatctggattttggtacggtcatgatcctgacgggagcggcagtgctgctgctgtggatcccgctacggcaaatgccggggctgggtacggtgagcaacgtgattgtgctggggctggcggcaaacgcgaccttagccgtgctgccgccgttggattcgctggtggcgcgtagcctgctgctggcgggcgctatcgtactgaatgcgctggcgacggggatgtatattggcgcgggctttggtcccgggccgcgcgatgggctgatgaccggtctgcatgctcgtacggggtggtcgctgcgcggtatccgcaccgcgattgaagtttcggtcctgctgattggctggatgatgggcggcaagtttggcgtgggaaccgtactctatgcgttaactatcggcccgctaatccagctgtgtctgccgtggtttcatcagccagccgcgcggaaggctctggcgaaacccggtgaggctatctcctgattttacgctgccatcagacctggagactaaacttatcaattcagatacggccggattctccggccgtactgttcacttcggagagcagactcatgaagtacgttgatggttttgtcgttgccgtaccggcggaaaataaggaggcataccgcgagatggcagcaaaggccgcgccattatttaaagagtttggcgcactccgcgtggtcgagtgctgggcggatgatgtcccggatggcaagctgaccgattttcgcctggtggtgaaagcggaggagagtgaagaggtggtgttcagctggattgagtatccctctaaagaggttcgcgatgccgcgaatgccaaaatgatggccgacccgcggatgaaagagtttggcgaatcgatgccctttgatggaaaacgaatgatatacggcggctttgccccgcttctggatgagtaattcatctttgccatccccatagcttttggggatggctatagatgcgctacagatgactccagccatgcagcagcatataaaaacccaccaccataatcagggtgccggaaatccacggcgctttgcgcgagagatcgttcagcccgggccagcggtttgccacgtgcttcaggctgagggcggcaattgccccggaagccaccagggtgatcgccagcccaacgctaaaccccagtaccagggttgcccccagcgagaactttttcaactgcaggcaaatgagcagtacggtaatggatgccgggcagggaatgagtcccccggtcagtccgaacaagacgatctgcccggtggtgacccgctggccgttaaagcggcgattgatcgcttgcgcatgcgcgcgctggtgggcgtcctgccagtcatcggcggcaacccgcgaaggttggtgagcgtgaggatgatgttgatgcgcaaggtggcgatcgtgatgatgttcatgttcatgttcatgttcatgttcatgttcatgttcatgttcatgtttatggtcatggtcatggtcatgttcgtgtccatggatatgtgaacgcgattcgcgccaggtacgcgccagcatccagcaggcaatcagtacgataaggccccctgagatcagctgaaaccagggttccgacgtttgtgcattccagccgcggccgaaccacaggcctgccatggccaccagccagaccaccgccgtatgcgataccgtcgccgccagccccagcagcaccgcctgctttaatgttccccgcaccgccacgataaatgccgccatcatggtttttgagtgcccgggctcaaggccgtgcagcgcgcccagcagaatcgcgctgggaataaatagccaggcgttgccctgctgcaagagtgaagcgaaatcgttcataacgtgatccctaactaaaaagtgcttgtatgctactcccccccagtacataaatactaccccccagtagaaaaatactccgggggagtagggcatgttatgctgttctgattgcatacaagggtcgttagtggaaacgatcgattaatcaaatagtggatcgcgaaatgtcacataccgttcgtcacaagaagatgttattgacccgattgaagaaaattcaggggcaaagcgccgcgctggaaaaaatgcttaaccgcgagcatgaatgcgcagaggttctacagcagctggctgccattcgcggtgcggtaaacggcatgatgatgcaggttatccaggggcatttaacggatcatgtcgtgaaggagccggaagaaggtcagcgtgaggctgaccttgatgtggtgatgcaggtgataaaatcctatctgaaataggctcagtcatcatgtgttccggacggcgatgaatacgccttaaggttattctcggcccacagaataaatttctcttttggcagcgccttactataaagccagccctgtgcatacagcacgccatgcatgcgcagccagtcgcgttggctttcggtttcgacgccttctgcgacggtcgccagattgagcgctttcgccatttcaatgatgtgcggcgtcagcgattcacactccagcgtatcgacaaatgctttatcgatttttagggtatcaacgtccagcttttgtaaatagctcaggctggaatagccggtgccgaagtcatcgatggagatacggtgtccggcctgacggtagccggcgatgactggcagagtggtttgcgggtcgacaaaaccgcgctcggtgatttccagaatgatctgctgagcgctgatgccccagcgctgaagctgctcttgtaacagcatcggcagctttggcgaacgcaaatcatcaaccgacaggtttatcgagatgtgtatctccgggcgctgccgcagccaggtaccgagatcggtaaatattttccgtacaatatcttcggttaagcgggtaatcagcccggtttgttcggcaagcggaataaaaatatccggtgataagaaactgccatcgggctgcctccagcgagcaagcgcctctgcgccgacgatctttccactctgcagcgaaataatgggctggtaataaacctgaatggcatgagaattcagcgcgtccagcatcccattacgcggtgagcgcagcctccgcagcaggcgaagcagcagaaatgaggccagaaggctggtgaacagaccaatcggcagccacagcatcagctgctgatgtagctttttctgcagcggcaccgtcgaggaccaggtggcaatggccagccccagctccgggagacgatgaagacgataaacggtgctatcgagggttagggtcctggcatactgatgcttaattttctcccagacggcagcgttgagtggtttactgctaatgatgatttgatcgcgctgcgtgccgaataagagcgtgtgaatcttttcatggcctaatggaatgacatcgataaacgacacgggatcgatcatcaccacgtgatgctcgctgcccatggccgtcattttatgtttcagacccaggtcgttaactgaggtaagccaggtacggtagccatcggccgtgatatggtcgggagcaggaaaggtaaccgaaacctgatgctcttcgagggaagagcactgcggaataccctcatgtaaccacagcacttcctgaacgtagcgatgggtataggcgatccgtcgcatcgtgagcaaatgctgcggactgcaggtggtagccgcatgcgcatcagcttccttcagcgcctctcttgcctgatcggcaacctgctgaacgcgggccagtacgcggacggaaaagttgtccagttcgctataaaattgctctttggcctgctgcattgccagccagatgctcagcgcgaccggcaggataatggcgagtatcaatacccctgtaaccagactcacctgatgccgggtcgtcatgagtatttccttattttattgaggggttcgatgagtatacgcgaaagataaaagaggattcagcacggggtagaaaaaggcccgaaccgcaagatagcaacgaattcgggctaacagtggatgaaccgcgacgcccaaggcctggagcgtcgcggagaaaaacgagggctggtatgctggcaataagcgttgtcagcacagattcatattctaaagcgcaatcatgacagtcatatgttgcgcttaatgggcgtccggggcagcgatgtcagcgctaatccgctggtcgttttcgtcaaagaccatgcagtagcgatcgtcaaacgcgacccttatcttctgccatggacggaaatgaacgtcgccgggcagcagaattttgacattatcgtggccgtagcactggccgaacagataggtgttgttacccagtctctccacgacttcacattgaaactcaactacggtaccgatattcacatcagttgagagatgttcagggcgaataccgagggtaacggcagcgccgggctgcagcggcgatgtggtgatattaagcgtcagattatgatcttgcgccatcttcacgctaagctggcccggctgccatgcggtgaccgtcgcgggcaggaagttcattttcggcgaaccgataaatcccgcaacgaacttattgaccgggttgtaatacagcgacatcggcgaacccatctgctcaactttgccgtagttcatcaccacgattttatcggccagcgtcatcgcttcaacctgatcgtgggtgacataaaccatggtggttttgagttcatgatgcagtttagcaatatgcaggcgcatctcaacgcgcagctcggcatccaggttggagaggggttcatcaaacataaacacccgtggattacgcacgatggcgcgaccgatcgccacgcgctggcgctggccgccggaaagctgcttaggtttgcgatccagcagatgagagagctgcagcgttttcgccaccatttcaacctggcggcgaatttcatcttttggcactttattcaccttcaggccatagcccatattttccgctaccgtcatatgcgggtagagcgcataggactggaataccatggcgacgccgcgatgggcaggaacgacatcattcatcacctcatcgccaataagcacttcaccttcgctcacctcttcgagaccggcaatcattcgcagtagcgtcgatttgccgcagcctgacggaccgacgaaaaccgcaaactcgccatcttcaatatcaagatttacctgatgcagcgtcactgtactgccgaaccgtttggtgacattcctcagtcgtatattggacatcaacattccccgggttagtagccgtttttgccgttgggatttgggctgtgacgcattatttgtataacgtgtaacaattcagcctggcgatgctcaacgacactaaaatcatgcagtgactataacttccagagttttagcgccctatatcgatgtttcatttctgcaatcacgatcacacaactggcagctttcagtagttttgtcagcattcaaagcgtaccgtataacaaatcaggaataacggcatatttgtttatgaatcaccgtttatcagttaactgaaagattctcggaagtcacatcgcccaataaaaaccattaaattgttataccttcacatgaggttgataatgaaaaagaacactcttgctgcactgatccttactactctggctgccgggcagctggttagcctgcaggcgcacgcggccggacagctcaacgtctgggaagacatcaaaaaatccgacggcattaaggccgcggtaagcgattttgaaaagcagttcaacgttaaggtgaacgtgcaggaaatgccgtacgcccagcagcttgaaaagctgcgccttgatggcccggcgggcattggcccggacgtgctggtgatccctaatgaccagctaggcggtgcggtcgtccagggactgctgtctcccctgacgctggacccggcgaagcaggaggcctttacgccggcatcaatcaacgcgttccatatggataacgtgctttacggcgtaccgaaagcggtggaaaccctggtgctgatttacaacaaagacctgatcgataagccgctggatagcctgcaggactggttcgactattcgaagaagcagcgcgaagagggtaagtacggcctgctggcgaagtttgaccagatctattacagctggggcgctattggcccaatgggcggctatatctttggcaaaaacgacaaaggcggcttaaacccgcaggatgtcggcctgaataagccaggcgcggtggaagcggtgactttcctgaaaaaattctacaccgacaaggtattcccggcggggatcctcggcgataacgggctgaacgccatcgactcgctgttcaccgagaagaaagcggctgcggtgattaacggcccgtgggccttccagccgtatgaagcggcaggcattcattatggcgtcgcgcctttgccgacgctgccggatggcaaaccgatgagctccttcctcggcgtgaagggctatgtcgtctcgacgtggagtaaagataaagcgctggcgcagcagtttatcgagttcatcaaccagccgcagtacgtgaaagcgcgctatgtcgccaccggggaaatcccgccgctgaaggccatgattgacgatccgctgattaagaatgacgaaaaggccagcgcggtggcggtgcagtcagcgcgggcgacggcgatgcccgggatcccggaaatgggtgaggtatggggcccggcgaacgccgcgctcgagcttagcctgaccggtaaacaggagccgaaggcggcgctcgataacgctgaaaagcagatcaagatgcagatcgaagccatgcaggccagcaatcaataattcggtgatgtaacagaacgggagggccgtcctcccgttttcagaaggagtcgtgtgtgattatcaatcccagcgaaaatattgccgaagcgcgcggcgcaggacgccatgcgtggtgcggcctgttgctggctatcgtgccgggttttgggcagttttatcaccgccagtggctgaaggggattgtcttcctggtgctgctgagcagttttatgagcattttctatgactttctcagcgaaggcctgtgggggttatataccttaggcgaggaagttccgcgggataactctattttcctgctggcggaagggataatcagcgtactgattatcgcattcggtttgttggtctatttcctctcgctgcgcgatgcctgggttaacggcaaaaagcgcgatgaaggcatggcgctgaatagcgtacgcaagcagtatcagatgctgctcagcgagggtttcccgtatctgatgatcacgcccggcttcatactgctggtgtttgtggtcatcttcccgatcctgtttggttttgctatcgcctttactaactacaacctttatcacacgccgccggcgaagctggtggattgggtgggattcaaaaacttcatcaatatcttcacattatccatctggcgctcgaccttctttgacgtactgcagtggacggtggtgtggacgctgctggcgacgaccctgcaatgtaccgtcggcgtgctgctggcgattctggtcaaccagaaagatctgcgctttaagccgatgatccgcacaattttcattctgccgtgggcggtgccgggcttcgtgacgattctggtttttgccggcatgttcaatgattcattcggggtgattaacaacgccattttgtccttctttggcatcacgccgaaggcctggctgaccgacccgttctggactaaaacggcgctgatcatgatgcaaacctggctgggctttccgtttgttttcgccatgaccaccggcgtcctgcaggcgatcccggacgatctgtatgaagcggccaccatggacggcgccagcgcgtttacccgcctgcggaccattactctgccgctggtgctctactccattgcgccgatcatcatcactcagtacaccttcaattttaacaacttcaatatcatctacctgttcaataacggcggaccggcggtagccgggtcgaatgccggcggtacggatattctggtgtcgtggatctacaaattaacgatgtcgtcttcgcaatacgccatcgcggccaccatcacgattctgctgtcgatttttgtcgtcggcctggcgttgtggcagttccgcgccacgaaatccttcaaaaacgacgacatggcgtaagggaagcaacatggctaaatcaccgagtattaaacgcgaaaagtggattcgcctgtctctcacctggctggtggtcctcttcgtatcgacgatcattatatatccgctggtctggacggtaggggcgtctctgaacgccgggaacagtctgctgagtacgtcgattattcctgaaaacctgtcgttccagcattacgcggatctgtttaacggcaatgtgaattatctcacctggtactggaactcgatgaaaatcagcttcatgaccatggcgttgaccttaatcagcgtgagcttcacggcctatgcgttctcccggtttcgtttcaaagggcggcagaacgggctgatgctgtttctgctgctgcagatgatcccgcagttctcggcgctgattgcgatctttgttctctctcagctgctggggttgatcaacagccatctggcgctggtgctgatctacgttggcggcatgattccgatgaatacctggctcatgaaggggtatctggacgcgatccccaaagatctggatgaatccgcgcggatggatggcgccagcagcttccgcatctttatcgaaatcattatgccgctgtcgaagccgattctggcggtggtggcgctgttttcatttaccggccctctgggggatttcatcctctccagcaccattttgcgtaccccggataaatacacgctgccgattggcctgtataacctggtggcgcagaaaatgggcgccagctacaccacctacgcggcgggcgcggtgctgattgccgtcccggtggcgattctctatctggcgctacaaaaatactttgtttccggcctcacctcaggcagtacaaaaggataaccccatgaaaagattaacacccgcgtggcttgctgtttctctggcatgctgtttttccgccggtacgctggcggcagatgcgctgcaaacgaaggcgtttagcaatatgcccgctgattttattaaaggcgcggatatctctacgctgctggatgcggaaaagcacggcgcgaagttctttaaccacaacaatcagccgcaggatccgatcgcgattctgaaggccgacggcgtgaactatgttcgcctgcgcctgtgggtggatccaaaagacgcccagggtcagcgttacggcggcggcgataacgatctggcggcgacgctggcgctggcgaagcgcgcaaaagcgcagggtataaagctgctgcttgattttcactacagcgatttctggaccgatccgggcaagcagttcaagccgaaggcctgggagaaaatggattatccgcagctgaaaaccacgatccacgactacacccgcgacacgattgcccgctttaagcaggagggtgtgctgccggatatggtccagatcggcaacgagatcaacggcggtatgctgtggccggagggcaaaagctgggggcagggcggcggcgagttcgatcgcctggcggggctgcttaacgccgccattgatggcctgaaggaaaacctcaccggcggcgagcagattaaaattatgcttcatctggccgaaggcacgaaaaacgacaccttccgctggtggtttgatgaaatcagcaagcgcaacgtgccttacgacatcattggtctgtcgatgtacacctactggaatggtccgattagcgcgctgaaagccaatatggacgatatcagcaagcgctataacaaagacgtgatagtggtggaagccgcttacgcctataccctggaaaactgcgacaacgccgaaaatagtttccaggcgaaagaggataaggatggcggttatcctgccaccgtacaggggcaatataattatattcacgacttaatgcaggccgttgcggacgtaccggaccaccgcggtaaaggtattttttattgggagccgacgtggattgccgtaccgggaaatacctgggcgacgcctgccggaatgaaatatatccatgatgaatggaaagaggggaatgcccgggaaaatcaggcgctgtttgattgccagggaaaagcattgccgtcgatgaaggtattcaattaattattcagctttacacttcaggatgtttattatgaaaaaatttgcgcctttgagtccgaaggtcaatgcgctattgcatggcgccgactataaccccgagcagtgggagaactatcccgatattatcgataaagatattgccatgatgcagcaggcaaaatgtaatgtcatgtcggtagggatatttagctgggcgaaacttgaacctcaggaaggcgtatttgagtttggctggttggacagtatcctggataaactctatgccgccggcattcatgtctttctcgcgaccccaagcggcgcgcgcccggcctggatgtcgcagaaatatcctcaggtcctgcgcgtcggtcgcgatcgggtgcctgcgctgcacggtggacgtcataaccactgtatgtcgtcgccggtctaccgtgataaaaccctgaaaataaattccctgctggcggagcgctactcgcagcatcccgcggtgctgggctggcatatctccaatgaatacggaggagagtgccactgtagcctgtgccaggagcgtttccgcgactggctgaaagcgcgctatgaaacgctggataacctcaatcacgcctggtggagcaccttctggagccacacctacagcgactggtcgcagatcgaatctccggccccgcagggggaagtctccattcatggtctgaacctggactggcatcgcttcaataccgctcaggtgacggacttctgccgccacgaaattgcgccgctgaaagcggcgaatgctgcgctgccggtaacaaccaactttatggagtatttctacgattacgactactggcagctggcgcaggtgctggactttatctcatgggacagctaccccatgtggcaccgtgataaagatgaaaccacgctggcctgctacaccgccatgtatcatgacatgatgcgcagcctgaagggcggcaaaccgtttgtattaatggaatccaccccgagcgcgaccaactggcagccgaccagtaagctgaagaaaccgggaatgcatattctctcttctctgcaggcggtggcgcacggcgcggattcggtgcagtacttccagtggcgtaagagccgcggttcggttgagaagtttcatggcgcgattatcgatcatgtcggtcatctggatacgcgcgtgggtcgtgaagtgacggcgctcggcgagatgctaagccagctgccgggcgtcgtgggctgccggacggatgcgaaagtggcgattatcttcgaccagcaaaaccgctgggcgctggatgatgcacaggggccgcgaaatctcggcatggagtatgaaaataccgtcaacgaacattatcgtccgttctgggagcaggggattgcggttgatgttatcgatgctgacgttgacctgagtccttatcaactggtcattgcgccaatgctgtatatggttcgtgagggatttgccgaacgcgccgaagcgtttgtggctaacggtggccatttagttacaacatactggacgggtattgttaacgaatccgacctttgccatctcggcggtttcccgggcccgctgcgtaaactgctgggcatttgggcggaagagattgactgcctgaacgacggcgaacgcaacctggtacaggggctggcgggtaatgaagggggcctgcagggaccgtatcaggtacgccatctgtgtgaactgattcatgccgaaatggcacagccgctggcgacctaccgcgatgatttttacgcgggacgaccggcggttaccgtcaatcacgtgggtaaaggtaaggcctggcacgtcgcttcgcgcaacgatctggctttccagcgggacttcttcaccgccataagtaaagagctgtcgctgccgcgtgcggtggcggccgatttcccgccgggcgtggtggcgaccgcacggacggacggtgaaaccacctacgtattcctgcaaaactacagcgcgcagcagcagcaggtgaccttaccgcagggctatcaggacagcctcaccggcacggcactgaacgcgccgttgaccttaaaagcgtgggattgccgtatcctcagtcgtcacgcgtaatttttctctatccacgcctgctcgcaagagcaggcgtttttttatctgcttatcaggagtctattatggtgagtttaaaatcctttctgaattacttctcccagtctcgtccggcggtaacgttaagcccggcggaacaacaacagattgaacgtttaattcaggcttttggcggcgaggcgaatattatcaacgttgacgcctgtatcacccgcttacgcgtcacggtgaataatctgtcgattgttgactctcaggcactacagcagcagggagcgcttggcgttattatccttgggcagcaggtgcatgctattttcggtaaacagtcggatgctttgcgtcaattacttgacgaacactttgccagccgtaaataaaataaaacgggataacgcaataatgagttatcccgaaaagaaaacaaagcattcaatggcaataatgattaccggagggtaattaacgaccttacagctggagataaaacagttaaatgacggctaccaccaggcctcgacctgtacaccaaagttccacgtattattggcagtttgatcttcgaacggtttaccgttttcagagtcattcagatacgaagcgaaaatgcgcagttccgggcgagacataaagtcagggccatcggccaggcccagcgcgatggtatatttctcaccggcctgcttataatcagtattgttcttgtagctatctttttggtaaaagccgcccacttcgccaatcaggcgcacgtattcggtgaactgatactgcccacgagccaccagcgacagcatgcgcgttttatccgtgtaatcggtgatgttgtccgcggagccccaggtgagaacgtggttaatggagaacttttcggtaatcggaattaaaccggtattaatcacgcggtatccggtggcgtcattgacgtagttccacatgtcgtaccagccgccgccctgggaaaccatgttctgcgccagccctttgttggcgtactgcagaaccgttttgttgtaaccacccagcatatcctggctgatttcaccggtcagcatgacgccgttttcagcatcgtatagaccaccgtaggagtcctgctttttagtggtattcggcatcgcgtagtcgataccaaattcggtccacgaaccggcccaaggcttccagcctgcgtagcgcaggtctaggtagttaatgttgacgttgctgtcgccatcgacgcggtagtcgacgtcattggcatcgccgcggatccaggcaaatgaaacggcccccgggccgagcgtatagttttcgatcccggcaccggatccggaaatgttccagtatttggtatcaatgatgtggagatcgtggcgctggtagtagcgtttaccgccccaaatgaccgcgttcggatcgccggggaccagccctttgatttgcaggttgagctggcgcaggccgaattgggcatcatcatcgagcgtggtttcgttatcgttagaaccgtcagaaaccatgctgaccatgctatcaagatagaagctaacgtcattcttcttatagacctctgatcccagctccagctcgccgtaggtatcggactcattacccagacggccaattttgtttttttgccattcggcctgactaccgtcgccggagaccccaaccccggcgcgcatatagccatgaaaatcgatacccggaagcgtggcggaagcagcaaacacggatggtgaaatcagcgcagcggccaacgcagcggagagtgtgcgcagcgtagtgttcatgtctatcctcttattgttttgtattacgttcacataaccgatgtcataaaatgcctaaaccagaattcaggcaattgaatgatcgctatattgtgattaactgcaaataaattggcgggttttgttacgactagtgagtctattcacaatttgttgtattgtgagcgtaatactttttgtgatgattgtggttcgggggacgcggcgatgagcgttttttcacattgcccctgttacaatccagggataacaacataaggaaccggactatgaagtctaaaagcgcgaccttagaagacgttgctcgccatgcgggcgtctcctatcagaccgtgtccagggtactcaacaaatctgctaatgtatccaaagccacacgcagcaaggtggagaaatccatcgaggcgctgcgctatgtcccaaaccgcctggcgcagcagctggtaggaaagcaaagccgcaccgtgggcctggtcaccatctccctcgcattgcacgcgccttctcaggtggctgctgcggtaaaacgctatgcgaatgtggaaggctatcaggtgctcatctctatgattgatgagagcgtcaaccaaagtattcaagattccattaatgaacttaagtctcagctggtagataaggtcatcatcaacgtgccgctggagactgaactggctcaaaaaattgccgctgataacgatgatatcgtctgtctgtttttagatgttgacccctacagctccgtgtttaacgtttcgtttaacccggctgacggcacccgggccagcgtcaaatatctctatgaaatggggcatcgggagatcgcgctgctagctggcccggaaagctcggtatcggccaaactgcgtctgaaaagctggattgagacccttgagggatatggcctgcagccggtcacggtgattcgcggtaactgggatgcgcagagcggttatgccggcgcgctgcaaatgctgcgggagacgccaaactttaccgccgttctggtgggtaacgatcagatggcgctgggcgtactgagcgcgtttcaccagcaccaggtgccgattccgggggaaaaatcggttattggttatgatgacacctatgagagttcgttcttttacccggcgctcaccaccgtttcgctggatcttgatttacaaggaaaagaggccgtccggcgccttctcgatagcggcgatcacgagacatctcatacttcctctatccttccggctcgtctggtcgtgcgccactctaccggaccgaaaacggagccgggcaaaaacctgcagtctattgccgaacagctcagagcgctggcgcatcagcttaatccttaatccgcaacgggcggcctgcgccgccctttagccccttccattctcagggttgatctttgtattcacccggcgtaccatgatgttatgttataacgtaatgattgaggtcgctatgaaacccaatattcatccgcattatcgtacggtggtttttcacgataccagcgccaacgaatacttcaaagtcggatcaacgatccgtaccgagcgcgaaattgagctggaaggcgagacgtatccctacgtaacgctcgatgtctcctccaaatcgcatccgtattacaccggcaaacagaaggccttcaacaatgaaggcagcaccgcgcgtttccgccagcgcttcggcggttttattgatgcgaaaaggagtaaataatgcaggtgctcaactcattgcgtagcgcgaaacagcgccacccggattgccagatcgtcaagcgtaaaggacggctgtacgttatctgcaaaagtaatcctcgctttaaggccgtccaggggcgcaagaagagacgttaacggaagctctccagcgttcgtaactgccggccgtcggcgctaaagttgtcggcggccagccactgctgcattgccttgtcaatatgcggccactcggaatcgataatcgaaaaccagtcggtatcgcggttgtggccctttatcaccagcgcctgacgaaaacgcccctcatactgaaatcccagccgcagcgccgcccggcgtgaaggctcgttcaaactgttgcatttccactcgtagcgacgatagccgagcgttgcaaaaatataatgcatcagcagccattgggcctcggtggccatcgccgtccggcttagtaaaggcgagaagtgaacgtggccgacttcaacaacgccatttttagcatcgattctcatcagcgccagtgagccaacgggctggtctgtccgttgatctatcacggcaaagtggatgggatcggcctgcccggaaacgtgctctatccacgcgcggtattcctctacgctgttatccggctcacgcagcagccacgtccagcttcgggtgtccggggccagccgatgggcgtcaaacagcgcaccggcatgcgtggagcgcaatggctcaaggcggcaaaggcgaccttgcagattcaacctttcaggatgcggacggggctgccagtcgggcagggctgcgccaacgggttgatcgaattgattaagatggctcatgaggttttcctttggcaggtgaatgctgcgagattaggcgcttgttggttccataaaaagagccacaggagtatgtttttagggtgccacgaggagcgatgatgaatattccggatgatgctttttttgctttactggagcaggccctgcgcggcaggggaggtggaaccctgcagcgtacgctctatcagacactacgcgaggcgattttacagggggcgctggcaggtgatagccgtttacccggctcgcgcgccatggcccagcgtctggggctgtcgcgcaacaccgtcaacggcgcgctggagcagctggcgatagaggggtatttattacgtagccgccaggggacgtccgtcgcgcctttaggaactcagggagagggggacgttgaggcgcgccatattgtgctccctgaatacttacagggattaccagcggcaatccatcgtgattcacccacgctgctctttacgccgggaatgcctgcggttaactactttccgctttccatctggcgccggctcctggatcgcgtactgcgtgaagagggaagcgcattattgggctacggcgatgcgcagggagagctcgtactgcgaaaaaccattgcccgccaccttgcgctctcgcgggggatccgctgtgaagccagccagattgtgattacggaaggtgcgctggaaggcgtcgatttatgcacgcatttgctgagcgtcgctggcgatacggcatgggtagaagaccccggctatccgggagcaaaaagcatctttctcaaatccggacttcatattgagggcgtgccggttgatcatgaagggatgcgttttgatagtcataatgatagtgaagcgccgcgattgatctttacttcaccttcccatcaatacccctgcggggcagtgatgagcgccgggaggcgactggcgctactggagtatgcccgccggcatgattcatggattattgaagatgattacgacagcgagtttcgctacagcggtgagcccattccggccatgctggggatggccaggcaggcgccggtggtttatctggggacattcagcaaaacgctatttccggcgctgcgcattggctttatggtgatgcctcccgcgctggcggaggccgcacgtggcgccattggttcgctattacgcggcggccatcgggccgaacagagggcgctggcgttgttcattgaggaggggcactacgcacgtcatttagccgccatgcgccgtttataccgcaaacgtcagcagcagctgcgggagattctggctcaagagctcaggcatccttatgaactgtttggcggcgaggggggcctgcacctgaccgttgctatcgacaacgtggatgacctggcgattgtgcagcaggcccggcggtttcagctggcacccggggcgttaagccgtttttacctggatgtaaaaacggcgcgaagcggctttgttctgggctacggtaatacgtccgcctcgcattttagggccgcggtacgcacgctgaaccgtcttattgcgctggaccgacgcgggtaagagaaaatacatcgtaaaaggagagttcgcctttggtggcgatcattttttgtagctgagccttttgttcgccgccgacgcgtggcgattgcaggatgcgttcaagcagctgctcagggacaaatcgggtgttgtaccactcaccgttgtagcacacgcggaaatcaagaacgtcaatatcttcataacgatagcgcgggtagacgtcgaagaagaagaaaccgtttagcagaacaaataacacaattaacagccagacagaatctaccagcgtttcggaacgtagcatcacaataagcgtggccaggaaagccgcgtacatggcgacaaaaagccatggatggttgcgaataaagctaatgctaaagcgcggacggttgtcgcgcttctctttcacattaagctcatcaatggtgctcttcagcagcagctgtatttctgtcatcttattccccaaattctgccatgagcccgtatccaggcgtgacaaaccgggctcagcctgaaggctattttatgttgcgtaaatccatggggaaagtaacagattggttgcagaaaagcataacagttaccgtttttcgctctccagcattttaattatccgtgccgggtttccgccgacgacggcgttggccggcacattttttactacgacggcccccgacgccaccacggcattatcgccgatagtgacgcctggattaatcactgcccggccgccaatccacacattgtggccaatggtgacgggttttccgtactcttgaccactgttgcggtcgacaggggcaaggggatgcgtggcggtataaatatgcacgcccggcgccagcatgcagttatcgccaatatgaattggacagacgtcaagcatgacgcaatcaaagttagcgtagaaatttttaccgaggaagatattgtagccatagtcacagcgaaatgtgggttcgatgtacgcgtcactcgcgtgcccaagcagttcagaaagtaatgcgtttcttaattcactttcttaaggcgccgaatgattgtagcggtgcagcagctgtctggcccgcagacgatcggctttcaacgtggcgtcacctgccagatacagttcgccggcaatcattttttgtttctcttcactcatggaggctttccttatttccttatcgttaggccgccatagtataaaaaagaaaccggtttcatattcgcgttaagccaacatctgtgagcactgtcacacttattatcatcacgagagaggggcgttttcggcacgagatgtatgactttcatttgaagtaaactagcggataaatttccagactgaaggggggatcttgtcatacagtttattcatcgtcagctctgcaagacgatgatcggccgcagagtaaaataccgccagttcattatcggaaagttcatatttatttttttcaattacgcgctccagcgtatcaattgtctgacagcgtcgtaaacgcatcaaatagtctattttggttaatgttttatcagacataaattcaccttttgattgtaataatactaacaagaaagactggccgggttttcccgactggcgttgacaaagcagcggaataaccgattgccagatttacgccatttctgcagatctgcgctgttaatgccgtagttgctgaacaagacgaaagtgtcatccagatattcgtcaatctgggtaatcagcttattatcctctgcgtacttaattttataattaagtgcaaacgcggcaatgtgctcgatcaattcattaagttgaagattgacagccgaggttggatcattaacccagccgtggttgctctcttccaggtttgcaagacagtcatgatacagggtttcgcagagaaatttaagctgcgcaatatcatgtctttttggcgagtattcgtccataacgcatccccttttgagtggtttaaacgacgattatcgacaccgttgtgggatgaacacgactaacagacctgacacatacattgtaatcttgctgtttaactataatccactcttaaaaagatttcatcgtgctattacgaaaaattacaattatcagcgtccttttatcttcaatgactcggactttattatatcgtgccgttaccccgatcggaaaaaacgaatactgaccttatatttcatcaggttagccgacgcgtttagccgttatagagagacaaccatacacaaaatcagtgattaagaatattctgagttaggggcgcaggaaagaaaattgtggaaaaaaaatggagataagcaccgcgactcatcattaaatattatatctcagcttataaattagacaataacaatccgtgcgttttaacgaggaacaaaagaaaagggccgcaaatgcggccctgagaggagagattaatgatgctcaaccggatggctgtgctcaatatcctcatttttcttactaaagcggcggcgaaccaccacgaagaacaccggcacgaagaaaatcgccagcaccgtcgcggtcaccatcccacccattacgccagtaccgacggcgttctgcgcgccggagcctgcgccggagctgataaccagcggcatgaccccaaggatgaacgccagcgaggtcatcagaatcggacgcagacgcatacgaacggcttccagcgtggcttcgatcaggcctttgccctctttatccatcaggtccttggcgaattcaacgataagtatcgcgttcttcgccgacaggccgatggtggtcagcagaccaacctggaagtagacgtcgttggttaatccacggaaggtagccgccagcagcgcacccacaacccccagcggaacaaccagcatgaccgagaacggaatcgaccagctttcatacagcgccgccaggcacaggaagacgacaatcagcgagatagcgtacagcgctggtgcctggttgcctgacaaccgttcctgataagacataccggtccagtcatagccaatacccgcaggcagtttacccgccagctcttccatcaggttcatcgcttcaccggtactcttgcccggtgtcgcctggccgaggatttccattgatggcaaaccgttgtaacgctccagacgcggcgagccgtattcccagcgtgaagtcgagaaggcggagaagggcaccatctgtccatcgctgccgcgtacgtaccagttgccgatatcttccggcagcatacggtatttcgcttcagacatgatatacactttcttcacgcgaccgcggtcaatgaagtcgttgacgtagctaccaccccatgctgcgccaagcgtcgtgttaatgtcgctgatagacacgccgagagcctgcgctttttcctgatcgatatccactttgaactgcggagtatcttccagtccgtttggacgcacgccggttaagacgtcaggatgctgcgcgaccataccaaagagctggttacgtgcctgggtcagtttttcatggcccagtcccgcctggtcgatcagctggaagtcaaagcccgttgcggtacccagttcaacaattgccggcaggttaaaggcgaagaccattgcgtctttaatctgcgagaaataccccattgcgcgaccggtaatcgcctcaactttgttctcttcgcccggacgctggctccagtccttcagagaaacgaacgcgataccggtgttttgcccacgacccgcgaaaccaaagccgtttacggcgaataccgattcaacgttgtttttctctttggtgagatagtagtcggtcatctcatccagaactttctgggtacgctcctgagttgcgccagcaggcagctgcgccatgctcaggaagacgccctggtcttcgtccggcaggaacgaacttggcagacgaacgaacagccaggccatgccgacaacgatgatcaggtacagcaccagataacgaccggtactgcgcaggatattgcctacgctatcggtgtagtgatgcgtgctcttatcgaacatgcggttaaaccaaccgaagaagccggtggtggcgccatggctgcctttctggatgggtttcagcatcgtggcgcagagcgccggggtcagaatcagtgccaccagtaccgacagcgccatcgcggaaacgatagtgatcgagaactgacggtaaatcgcaccggtagaaccgccgaagaaggccatcgggataaataccgcggaaagcaccatcgcgatacccaccagcgcgccctgaatctggcccattgatttacgcgtggcttccttcggcggtagcccttcttcggccattacacgctcgacgttttctaccaccacgatggcgtcatccacgagcaggcctatggcgagcaccataccaaacatggtgagggtgtttatcgagaagccgaacagcgcgaggatagcgaacgtccccagcagtacaaccggcacggcgatagtcggaatcagcgttgcgcggaagttctgcaggaacaggtacatcaccaggaacaccagaatgatggcttcaaccagcgttttcaccacttcgtgaatggagatctgcacgaagggggtggtgtcatacgggtaaacaatcttcaggcctgacgggaagaaaggttccattttcttcagttcggcacgaatggcgttggcggtatccagcgcgttcgcgccggtcgcgagcttaatacccagaccggacgcgggctgaccgttaaacttcgcaacgacgtcgtagctttcgccacccagctcaatcttcgcgacatcgcgcagacgcacctgggaaccatcctggttaaccttcagcagaatgttgccgaactcttcagtattggtcagacgggtctgcgccacgatggaggcgttcagctgctgacctttcaccggtggagtaccgcctaactgtccggctgcgacctgggcgttctgcgctttcagggcgctgatcacgtcaaccggcgtcagctggaagttattaagcttgttcggatccatccagatacgcatcgcgtactgggaaccgaacagctgcacgtcaccgacgccgctggtacggctaatcgaatccttcatgttggcggcaacatagtcagaaatgtcatcctgattcatggtgccgttggtattgataacgccgacaaccatcaggaagctgctggatgccttttcaacgctaataccctgctgctgaacttcttgcggcagcagcggcgttgccagcgccagcttgttctgtacctgtacctgggcgatatccggatcggtaccggattcaaaggtgagggtgatggttgctgtaccggtggagtcgccatttgaagacatgtacatcaggtgatcgataccgttcatgttctgttcgataacctgggtcacggtgttctgcacggtttcggcatcggcaccggggtacatggctgtaatggaaattgccggcggcgcaatcgtcggatattgcgctatcggcaacttgaggatcgataaccccccagccagcatgatgataatggcgatcacccacgcaaatatggggcgatcgataaagaaattaggcatgtcttaacggctcctgtttaagttaagacttgggttgttctgactgagcgttgcctgcggcttgctgtttatcgtcagaaacgacttcctgcgctttaacctgcacgccaggtctgactttttgcagaccggtgatgatgacgcgatcgcccgttttcagcccttcggtgaccagccatttatcaccaatagcctgagtggcggtaatctggcgaacttcgactttatcaccttcgccgacgaccatcgcgctggcatcgccgcgcggggtgcgggttacgccctgctgaggaaccagcagcgcatccgggttgacgccttcttccagacgcgcgcggacgaacatccccggcagcagagtgtgatccgggttcgggaaaatggcgcgcagcgtgatagaaccggtggtctgatcaacggtgacgtcagaaaactccagcgtaccgttctgcgggtatttcagaccgtcgttcgtcaccagctcaaccttcgctttgccgttttcctgctgcagcttgccgttggccagctcttgtttcagacgcaggaaatcgttgctcgattgcgtcacgtcaacatagataggatccagctgttgcacggtcgccagggcggtggtttggccgttttgcaccagagcaccttccgtgaccgcggatttaccaatgcggcctgagattggcgaggtgactttggtgtaggccagattaatgcgcgcggtttcaaccgctgctttggcggcaaccacggcggcgttgctctgttgcgcggtcgcgacggcagtatcgtaatcctgttgactgatgtacttagtgcctaacagtttctgataacgtttaaccgtcagctgatccatatttgccgcggcctgcgctttggctaaatcgcctttcgcgctttcataagtggcctgataggtcgccggatcgatttgataaagagacacccctgcctggatatcgctcccttcggtgaagttacgtttaagaataatgccactgacctgaggacgaacttccgcaacgcgataggcgctggtacggcctggcagttcggtagtaatttgtagaggagcggatttgagcgtcacaataccgacttccggcatttgttgggctccttgctgagccggtttgtcgtcacatcctgttagcgctaagctgcctgagagcatcagaacgaccgccagaggcgttaaccctctgtttttgttcatatgtaaacctcgagtgtccaatttcaaattgttcagtggctcaatcgaccacaaacccactgctgtgtttctattatggtcatgctatggtacatacattcacaaatgtatgtaaacgtaacctctgtaaactcatcgacctatggcacgaaaaaccaaacaacaggcgcttgagacccggcaacatattctggatgttgctctgcgtctgttttcgcagcaaggcgtatcatccacctcgctggccgcaattgcaaaagaggccggtgtgacgaggggcgctatctattggcatttcaaaaataaatcagatttatttaatgaaatatgggtgctttcagaagccaacatcaacgatctcgaagttgagtatcgggcaaaattccccaacgatccactgtcagttgtcagagagatcttagtgtatatccttgaagcaacggtgacagaaaaacgcaggcgcttgatgatggaaatcattttccataaatgcgagttcgtcggagagatggtcacgctgcaagaagcgcagcgaagtttatgccttgagagctacgatcgtatcgagcagacattaaacgagtgcattgcggcgaagatgctgcccgccaatttactcacccggcgggcggcgattttaatgcgcagctatctttctggcctgatggagaactggctgctggcgcccaacgctttcgatctgcagcatgaagcgcgggcatatgtcgaaacgctgcttgaaatgtatcaattgtgcccctctctgcgcagttctgaaggcgcggaagcttaagtatcctcgcggacaaaaggggtatttttcctgctgtccgccgctattcgcgcgataacagaagtgctattcttcgcgctgcgacgatccccggtattctccggcttttgcaatcactcatgttaacactatgctgcatactatccgttggcgaaacgccatatccgcttttgttcttaccctgatgttttttatcggctgtattagcgttaacacggcgctggcggctgacttacctgaacgttccgaggtgcaaagccagctcacgacgctgaataagcaaaaagagctgaccccgcaggacaagctggttcagcaggacctgacccagaccctggaaaccctcgataaaatcgaacgcattaagtcggaaacgacgcagctgcgtcagcaggtggctcaggcgccagcgaaaatgaatcaggctatcgatagcctcaacgcgctaagcgatgttcccgatgatgaggcgacgcgtaaaacgctgagcacgttatcgctacgtcagctggaatcgcgcgtctctcagacgctggacgatttgcaaaacgcgcagaacgatctggcaacctataacagccagttagtctccctacaaacccagccggaacgtgtgcagaatgcgatgtactccgcttcgcagcagctgcagcagatccgtaaccgcctgaatggcacctcgacgggcgaggagacgctgcgtcctacccagcagagtttgctgctggcgcagcaggctctgctgaatgcgcagatagaccagcagcgcaaaagcctggaaggtaacacggtcctgcaggataccctgcaaaagcagcgtgattacatcaccgcctacagcaaccgtcttgaacaccagcttcagttattgcaggaagcggtgaatagcaagcgcctgacgctgacggaaaagacggctcaggaagcggtttccccggacgaaacggcgcgtattcaggcaaacccgctggtgaagcaggagctggagattaaccaccagcttagcgaaagactgatttcggcgacggaaaatggtaatcagctggttcagcgcaacatcaaagtgaagacctggctcgatcgcgctttgcaatccgagcgtgatataaaagagcagatttccgtgctgaaaggcagcctgctgctgtcgcgtatcctttatcagcagcagcaaacgctgccctctgcggaggagctgagcgatatgacgaaccgcatcgccgacctgcgcctcgaacagtttgaggttaaccagcagcgcgatgcgttgttccagagcgatgcgtacgtcgcgaagctggaggaagggcacagcagcgatgtcaatgccgaagtgcatagcgcgcttctcgaaatcgttgatatgcgccgggagctgctcgatcagttcaacaaacagctgggtaaccagctgatgatggccattaacctgcagatcaatcagcagcagttaatgagcgtgtcgaccaacctgaaagccattctgacgcagcagattttttgggtaaacagtaaccgtccgatggactgggagtgggttaaagccttcccggaagcgctgaaagggcagtttaaggcgatgaaaatcaccgtaaactgggaaaaagcctggcctgcggtatttatcgctttccttgccggcctgccgttgctgctgattgccggtctgattcgctggcgccttaactggctgaaagcgtatcaggcgaagctggcttcacaggtggggcaactgcgcaatgacactcagcttcacacgccgaaagcgattcttatcgatctgatccgcgcgctgcctgtggtgctggtgattctggccattggcctgattctgctgaccatgcagctgaatatcagcgatttgctgtgggcctatagtaagaagctggcgctgttctggctggtgtttggcctgtgctggaaggtgctggaaaaagacggcgtggcggtgcgccactttaatatgccgtcgcagttgaccagccactggcggcggcagattgtccgcgtcagccttgcgctgctgccgctcaatttctggtcggtgatgtcggagctgtcgccgctgcacctgatggatgacgtgctcgggcaatttgttattttcctcaacctgctgctgattgcggtgcttgttctgccgatgtgccgcgaaagctggcgtgataaagagtcccacagcctgcgccttatcaccgtcaccgtgctatcgattgtgcccatcgccctgatggtgctgacggcaaccggctacttctacacgacgctgcgtctggccggccgctggattgaaaccgtttacctggtgatgctgtggaacctgctgtaccagaccgttctgcgcggcctgagcgtggccgcccggcgtattgcctggcgccgtgcgctggcgcgtcgtcagcatctggttaaagagggtgctgaaggggccgaaccccaggaagaaccgacgattgccctggagcaggttaaccagcaaacgctgcgtattacgatgctggtgatgattgcgctgtttgccgtgctgttctgggcgatttggtccgatctgatcaccgtgttcgcctatctcgacagtattacgctgtggcattacaacggtacggaagccggcgtcagcgccgtgaaaagcgtcaccatgggcagcctgctgttcgcgattgtcgcgtcgatggtcgcctgggcgttaatccgcaacctgccgggcctgctggaagtgctggtgctatcgagactcaatatgcgccagggggcgtcgtatgcaattacgaccatccttaattacgccattattgttattggcgcgatgacggtatttggctcgttgggcgtttcgtgggacaaacttcagtggctggcggccgccctgtcggttggtttagggtttggcttacaggaaatcttcggtaactttgtttccggtctgattattctctttgagcgcccggtgcgtattggcgatacggtgaccattggtaccttctccggtaccgtcagcaaaatccgcattcgcgccacgacgatcaccgattttgaccgtaaagaggtcattatcccgaataaggccttcgtgacggaacgcttgatcaactggtcgctctccgacaccgtcacccgcgtggtcatccgccttggcgtggcctatggttccgacctggataaggttaaagaagtgctgctccaggccgcgcatgagcatccgaaagtgatgcaagagcccgcgccctcggtcttctttaccaccttcggcgccagcacgctcgatcatgaactgcgcctgtacgtgcgtgaacttcgcgatcgcagctatgcggtggatgagcttaaccgcgctatcgatcgtttgtgccgcgagaacaatattgacatcgcctttaaccagctggaggtgcatctgcgcaatgagaagggcgatgaagtgacagaggtgaagcgggataagggcgacgatgcctccccggcgataagctaagcataacggggcggtgggtatccgccccgcagatgttaatggctgagcgaggagagttcttcctggctcagaccggtcagttccatcaccatcttcggctccagcccgcaggcgagcattttcagggcaatgctgtgcgagatttctctacggccctcctgcaaaccttcctgcaaaccttcctgtctgccttcttttctaccttttttacggcctttctcttccagccattcggcaattgtcatcagtagctccttgtgcctgggcgactgcttcgccagctcgcgaatcaggggcccaggtttttccgaggttcccgcctgcagcatatagctgatgagggtattgatctggttttccgtcagatatccttgcgccagcagcgtaatcagcatcggttgcagttcggccagatcgcgctggcgaatatgcttttgcaacagttccagcatcgccatacgctggtggcggaggatatgattatctggcataacggtcaggtccaccagcggaaaatctccgccgtacagcgcgccggcaagctcaggaaggtcaaaaagctggagccagttgagcgtatgtggccaggggctgacggtgccgtgataaaacagaatcgggaccaccagcggcagcgtattgtggccggcatccaggtggcgctgcatggcggccagcgtatagcgcatcaggcgaaaagccatcagcttatccggcgagctttgatgttcaatcagcgcgtagatatatcccgcgccgtgctgcgtttgtagggagtagagaatgtcggagtagctggatcgcaggtcttcctcgataaagctgccggaagccagctgcagcgtattgagatcgcagatacttaaaaactgcgcgggaagataaagctgtaaaaaatcgcgagcgacctctttctgggccagcatttgacgaaaaatagcatcgtgcggcgtacgtgagaatctttccatgagcatctatccgttgtggtaaggggcaggcgacaactctgccacccccaaagatccgccaacagactactcctgtgcgttttgcgaggcctcttccgcactttttactttgttttcatagtctcgacggataatttccagcgcagctagcacggtttgcgcaggaactttattctcctcaagcagcataattaaatcgacggccagcttgacctcgtcaggggcattttccagcgacatacttcttcctcccgttagcgcgttaagcgggccagtctgttttcaattttttccagcgcgtcgcgacagcgggccaggcgcccggtataggcttcaacttcctttgccagccgctgttggtcatcaaggcttatggcttgcgccagccgtctttgtcggtcgttgcgcatggccagcaggcgccgttcatactcctgatgctgtagacgtcggcgctgccagcggctaagcgttggcgacgcgctatcccaggcgcgtaatgaccaggtcgccgtttcccggttaatcgcggcgatttgagcaacgagacgttccgccagccaggcgacctgcgcaagctgctggcgttcggccgcctgttttaacgccgtaaagccgtctctggcctcattgagataagcctgcatctgcgtgctgcgggtacggaacagctgacgatcgaagcgcgggctgagggtcgcgtgattggccatgggcgccacctgagcggccagctccgcaagctggttttccagtgaatgtaaaagccgggcggttttcaaataactcctccatcccctgataagcaactgtgctacattagcgttatcttcgtgataacgattcgcattatgccacgtattattttgatcatcattggctggctggcggtagcgctgggaacgctgggcgtgtttttaccgctactgccgacgacgccgtttatcctgcttgccgcctggtgctttgcgcgctcgtcgccgcgctttcaccactggcttttgtatcgctcatggtttggcggctacctgcgccactggcagaaataccgcgccatgccgccgggcgcgaagccgcgggcggtcgcgatgattttgctgacctttgccatttcgctgtggctggttaatcttacctgggtgcgcatcttgctgctgatcattctgacctgtctgctgatatttatgtggcgcattccggtggttgatgcaaagcaacaaaagcactgatgcgcaataatgatggttgcaattgtcgctgacagccagtaaattctggcgttttcgagcgcgggtaagcctggtcaaaggttaaacaaaagtttctttggcccatttggcatgcccgtgagtaacaccgttttaatcaggcatacacttatgaccgcaacagcacagcagcttgaatatctgaagaacagcatccaaagcatccaggactatccgaaacctggcatccttttccgtgatgtcaccagcttgctggaagacccgaaggcctacgcgctcagcattgagctgctggccgagcgttataaagacgcggggattaccaaagtggtgggcaccgaggcgcgtggcttcttatttggcgcaccggttgcgctggcgctgggcgtaggctttgttccggtacgcaagccgcgtaagctgccgcgtgaaactatcgcagaaagctacgagcttgagtacggcaccgatcagctggaaatccatgtcgatgcgatcaaagaaggcgataaagtcctggtggttgacgatctgctggcaaccggcggcaccattgacgccaccgtgaagcttattcgtcgcctgggcggtgaagtgcacgatgcggcctttattattaatctgttcgatctgggcggcgagcagcgcctggaaaaactgggaatcaactgctatagcctggtccctttcccgggccactaagcaaatcccgccacatagcctcgctgattgagcggggctgtgatagcatgacccctcgtgatttcaccttccagcgtttcagagccagcccatgagttatcaggtcttagcccgtaaatggcgcccacaaacctttgctgacgtcgtcggccaggaacatgtgctgaccgcactggcgaacggcttgtcgttagggcgcattcaccacgcatatcttttttccggtacccgcggagtcggtaaaacctctatcgcgcgcctgttggcaaaaggattaaactgcgaaaccggcattaccgccacgccgtgcggcgtctgcgataactgccgtgaaatagaacaggggcgctttgtcgatctgattgagatcgatgccgcctcgcgcaccaaagtcgaagatacccgcgatctgctggataacgtccagtacgcgccggcccgcggtcgcttcaaggtctatctgatcgatgaagtccatatgctttcgcgccacagcttcaacgcgttgttaaaaacgctggaggagccgccggcgcacgttaaatttctgctggcgacgaccgatccgcagaagctgccggtgactattctttcccgctgcctgcagttccatcttaaggcgctggacgtcgagcagattcgccatcagctggagcatattctcggcgccgagcagatcgcttttgaaccgcgcgcgctgcagctgctgtcgcgcgcggcggacggtagcctgcgcgatgcgttaagcctgaccgatcaggccattgccagcggcgacggtcgcctgacggctgaatccgtcagcaccatgctcggcacccttgacgacgatcaggcgctttcgctgattgaggcgctggtggctgccgacggcgagcgggtcatggccggcgtcaatgaggctgccgcccgcggcgtggagtgggaggccttgctggtggagatgcaaagcctgctgcaccgtattgcgatggttcagctctcgccgtcggcgctgggagcggatatggccgcgattgagctgcgcatgcgcgagctggcgcggacggtgccgccaaccgatgttcagctgtactatcaaacgctactgattggccgcaaagagctcccgtacgccccggacagacgaatgggcgtcgagatgacgcttctgcgtgcgctggctttccatccgcgtatgccgctgccggaaccggaggcgccgccggtgcaggctattcaggccgcaccggcccagcaggctgccccggcatccgcgccgtcgtcgccgccgccgaatttgccgcagaccaccagccaggtgctggcggcccgcagccagctgcagcgtagccagggagcgcccaccccaaaaaagagtgaaccggcagccgcttcccgcgcgcggccggtgaataacgctgcgctggaacgactgagttcaattaccgaacgcgtacaggcgcgtccggcggcggctgcgctggagaaagcgccggcgaaaaaggaagcctatcgctggaaatcgacgacggttgttgaagccgtaaaagaagaagtggcgacgccgaaggcgctgaaaaaagcgctggagcatgaaaaaacgccggaactggcggcaaagctggcagtcgaagcggtcgagcgcgatagctgggcggcggaagtcagccggcttgcggtacccaaactggtggagcaggtcgccctgaacgcctggaaagagcaggagggcaatcgcgtctgcctgcatctgcgtccgagccagcgtcacctgaattcggcgggcgcgcagcaaaagctggcggaagcgctcggtattttgtacggtacgccggttgaattgaccatcgtggaagatgataatcccgcgatgcgcacgccgcttgagtggcggcaggcaatttatgaagaaaagctcgcgcaggcgcgtgaagcgattattgcggataataacattcagacgctgcgtcgattcttcgatgcggacctggatgaagagagtattcgccccatttgattgcaagtctgacttgcggtcagcatccttaacgatgacttactgagagagaagcctatgtttggtggaaaaggcggtctgggtaacctgatgaagcaggcccagcagatgcaagaaaaaatgcagcagatgcaggaagaagtggcccgactggaagtgaccggtgaatccggcgctggcctggtaaaagtcaccatcaacggcgcgcacaactgccgtcgcgttgagatcgacccgagcctgctggaagacgacaaagagatgctggaagatctggtggctgccgcgtttaacgacgccgcccgccgcatcgaagagacgcagaaagaaaaaatggcgtccgtgtccgccggtatgcagctgccgccaggctttaagatgccgttctgatgcagaccagtccgctgttaacgcagcttatggaagcactgcgctgcctgccgggtgtcggcccgaagtcggcgcagcgcatggcgtttaccctgctgcagcgcgaccgcagcggcggaatgcgcctggcgcaggcgctaacgcgcgcgatgtcggaaatcggccactgcgccgattgccgtaccttcaccgagcaggaggtgtgcaatatttgcagcaaccctcggcgcaaggaaaacggccagatctgcgtggtagagagcccagcggatatctacgctatcgagcagaccgggcagttttccggtcgctactttgtgctgatgggccacctgtcgccgcttgacggtatcgggccggatgacattgggctcgatcgtctggaacagcgtctgcgtgacgaatcgatgcaggaagtgatcctcgcgaccaacccaacggtagaaggggaggcgacggccaattatatcgccgagctctgcgcgcagtatggcgtagacgcgagccgtatcgcccatggcgtaccggtcggcggcgagctggagatggttgacggcacgacgctatcccactcgctcgccgggcggcataagattcgtttttaatcaaacggaggcgcttttcggggcctccgcttgaaaacttctccctctgtccccatctcaccctcaacggtttttttaccattaacaatggcattgttgaggttgatttagatgaaaggacaagaaactcgtggttttcagtcagaggtcaagcagcttctgcacctgatgatccattctctttattccaataaagaaattttcctgcgtgagctgatttccaacgcctccgatgcggccgacaagctgcgcttccgcgcgctgtcccagccggatctgtacgaaggcgacggcgaactgcgcgtgcgtgtttcatttgataaagacaaccgcaccctgaccatcgccgataacggcattggtatgaatcgcgatgaggtcatcgaccatctcggcaccatcgccaagtccggcaccaaagcgttccttgagtccatgggctctgaccaggcgaaagacagccagctgattggccagttcggcgtgggcttctattcggcgtttattgttgccgataaagttaccgtccgtacccgcgcggcgggcgacagcgccgaaaacggcgtcttctgggaatccgctggcgaaggcgaatataccgttgccgacattaacaaagccgatcgcggtaccgagatcacgctgcacctgcgcgaaggcgaggacgatttcctcaacgactggcgcgtgcgttcgatcatcagcaaatactccgatcacattgcgctgccggtggaaattgaaaagcgcgaagacgttgacggcgaaaccgtcattagctgggagaaaattaacaaagcccaggcgctgtggacgcgcaataagtcggaaatcaaagacgacgagtacaacgagttttataagcacattgcccacgattacagcgatccgctgacctggagccacaaccgcgttgaaggtaagcaggagtacaccagcctgctgtatatcccgtcgcaggcgccgtgggatatgtggaatcgcgatcataaacatggcctgaagctgtacgtgcagcgcgtcttcatcatggatgacgccgagcagtttatgccgaactacctgcgtttcgtccgcggcctggtcgactctaacgatctgccgctgaacgtgtcacgtgaaatccttcaggacagcagcgtcacccgcaatctgcgtaccgcgctgagcaaacgcgccctgcagatgctggaaaaactggcgaaagacgacgcggaaaaatatcagaccttctggcagcagtttggcctcgtgctgaaagaggggccggcggaagatcaggccaaccagcaggccatcgccaaactgctgcgtttcgccagcacccataccgactccgccgcgcagaccgtgtcgctggaagagtacgtctcccgcatgaaagaagggcaggagaagatttactacattaccgccgacagctacgccgccgcgaaaagcagcccgcatctggaactgctgcgtaagaaaggcattgaagtgctgctgctttccgatcgcatcgacgagtggatgatgagctatctgaccgagttcgacggtaagccgttccagtcggtggcgaaagccgatgagtcgctggataagctgacggacgaagtggatgaaactactaaagaagccgagaaggcgctggagccgttcgttgagcgtgccaaaacgctgctcggcgaccgggtgaaagaggttcgtctgacccatcgtctgaccgatacgccggccatcgtcaccaccgacgcggatgaaatgagcacccagatggcaaaactgtttgccgctgcgggccaggccgcgccggaagtgaagtacatctttgaactgaacccgctgcatccgctggtaaaacgcgcggcggatacccaggatgatgcgcagttcggcgagtgggttgagctgctgctcgatcaggcgctgctggccgagcgcggtacgctggaagatccgaaccagtttatccgccgcatgaaccagctgctggcgtcgtaatctttaccctcactctacccctctcccgctgggagagggccggggtgagggcatcaaaccgcactctacgtaaaatatctcaccattaaccgtttcagccgccccgccttccttgagccatccgcgttctggtggtatggtttagcgttttttgaaaaattgaatcaacttttgaggggattttcgtaatgcgtattattctgcttggcgctccgggcgcgggtaaaggaactcaggctcagttcatcatggagaaatacggtattccgcaaatctccaccggcgacatgctgcgtgccgcggtgaagtcaggctccgagctgggcaaacaggcgaaagatattatggacgccggtaagctggtcaccgacgaactggttatcgccctggtcaaagagcgtattactcaggaagattgccgcaacggttttctgctggacggcttcccgcgcaccattccgcaggctgacgccatgaaagaagcgggtatcaccgtggattacgtgctggaattcgatgttcctgacgaactgatcgttgaccgcatcatcgggcgtcgcgttcacgcagcttccggccgcgtttaccacatcaaatttaatccgccgaaagttgaaggcaaagacgacgtgaccggcgaagagctgaccacccgtaaagacgaccaggaagagaccgtgcgtaagcgtctggttgaatatcatcagatgacggctccgctgatcggctactatcagaaagaagccgaagcgggcaatacccagtacgcgaaagtcgatggcaccaaagcggtggccgacgttcgcgttgaactggaaaaaatcctcggttaattccgttagttctcatcccgccgcggcggggtgagaactcctctcattttacctttttctatgattggttccgtttagcgccatttcagctacaattgtcagcgattcaaatggttaagaggcggtaatgcatcagacgaaaacaggtatcttattagccaatttaggcactcccgatgcgcccacgcccgacgcggtaaagcgctatctacgacagtttcttagcgatcggcgcgtggtggatacctcccgtctactgtggtggccgctgctgcgcggcgtgatactgcccctgcgcgcccccagggtcgccaagctctatcagtccatctggatggaagatggctcgccgctgatggtctatagccagcagcagcggcaggcgctggccgcgcggcttccggatacgccggtggcgctggggatgagctacggttcgccgtcgctggagagcgcggttgatgaactgctggagcagggcgtggatcacatcgtggtgctaccgctctatccgcagtactcctgctccaccgtggcggcggtctgggatgaactagggcgtatccttgccaaaaagcgcgccatccccggcatctcttttattcgcgactacgccgatgacgtggactatattcacgcgctggccgccagcgtgcgggcatcctttgcggtgcacggtgagccagatttactgctgctctcctatcatggcatcccgcagcggtacgcccagcaaggggatacctatcctcagcgctgtcgcgataccacccgtgagctggtttcagccctggggctgccgcctgagcgggtgatgatgacgttccagtcgcgctttggtcgtgagccctggctgacgccctacaccgacgaaacgctgaaaatgctcggtgagaaaggggtgaagcatattcaggttatctgccccggcttttccgccgattgcctggagacgctggaggagatcgcggtgcagaaccgggaaatcttcctcgaagccggcggccagcaatatgagtacattccggcgcttaatgcggacaccgcgcatattgaaatgatggtcaacctgacggcgaaatatcgctgatcgcgcgtgcggcggggagtatgctactattccccgcttgttcactgtcaataaatcgccactatgaaatttcccggtaaacgcaaatccaaacactattttcccgtcaacgctcgcgatccgctgctgcagcaaattcagccggacaatgagtctaacgtcgcctgggtggtcggcatcgatcaaaccctggttgatatcgaagcgaaagtggatgaggcgtttatcgtacgctacggcctgagcgccgggcattcgctggtgattgaagacgatgtcgccgaagcgctgtatcaggaactggtccgcaacgacctgattacccaccagtttgccggcggcaccatcggtaacaccatgcacaactactcggtgctggcggatgaccgttcggttctgcttggcgtcatgtgcagcaatattgaaatcggcggctacgcctaccgctacctgtgcaacacctccagccgtaccgatctgaactacctgcagggggtggatggggcgattgggcgctgctttacgctgattagcgactccggcgagcgcacctttgcgatcagccccgggcatatgaacaagctccgtccggaaagcattccggagagcgtcatcgccggcgcctccgcgctggtgctgacctcctatctcgtgcgctgcaagccgggcgagccgatgccggacgcgacgatgcaggccatcgcatatgcgaaaaagcacgatgtaccggtggtcctgactctggggaccaaatacgttatcgccgataatccggcgtggtggcaggcgttcctcaaggagcacgtctctattctggcgatgaacgaagaggaggcggaagcgctgaccggactatccgatccgctgctggcttccgacaaggcgctggagtgggttgacctggtactgtgcaccgccgggcctgccgggctgtatatggccagttttaccgaggatgaggctaagcgcaaaacgcagcatccgctgctgccgggcgcgattgccgagtttaaccagtatgaattcagccgcgcgatgcgccatcaggattgcgaaaatccgctgcgtatttattcgcatatcgcaccctatatgggcgggccggagaagatcatgaataccaacggcgcgggcgacggcgcgctggcggcgctgctgcacgatatcaccgccaataactatcatcgcaacaacgtgccgaactccagcaagcacaagtgcaagtggctgacctattcctcgctggcgcaggtgtgtaaatacgctaaccgcgtgagctatcaggtgctgaaccagcactcgccgcgtctgacccgcggcctgccggagcgtgaagatagcctggaagaggcttactgggatcgctaagccggtaagtaaagccggccccgagaagtcggggccggaagcattaaccggtaataagctcgcctgctggcggcgtttcgagcagctgcagcatggcgcgggcgatttcccgctcgcccatcaccacctggttggcgccgcgttcaacgatatactccacttcatcgtcgtagtgggcgcgcgcgatgatctcgatattcgggcacttctcgcgcgcggaagccacgatttccccggcttcatagccgttagggatggtcagcagcagccagcgggcgcagtcaagatgcgccagattcataatctcttcattggcggcgttgcctaataccgcgcgaataccgcgtgcgcgcagttcgtcaacgcgggtacgcgaggtttcgataaccaccagcggcacgccctgcgccatcagtttttcaccgagcaggctcccgacgcgaccgaaaccgaccagcagcgcgtggttacagatatcgacggggatctgtttctcatcttcaagcacttcttccagcgtctgttcgtccagcgtctccgttttatcgagatatttttccagcagggtaaacaggaccgggttgagcatgatggagataatggcgccggcaagcaccaggttttgcccggcctgcggcagcagatccagcgccattcccagcccggcgagaataaaggcaaattcaccgatttgcgccaggctggcggcaatggtcagcgcggtgcgcggcgagtggccgaacattcgtaccaggaagaaagcggcggccgatttaccgaaaataatgatgaccagcgtcgccagcaccgccagcggctgatcgatcaggatcatcgggtcaaacagcattcccacggaaacaaagaacagtacggcgaaggcgtcgcgcagcggcagggtatcgtgggccgcgcgatggctgagctcggattcattgagcaccataccggcgaaaaaggcgccgagggcgaaggagacgtcaaacagctcaacggcgccgaaggcgatgccgagcgctaacgccagcaccgacagcgtaaacagctcgcgcgagccggttgccgcgctgcgtgacataatccacggcaccagtcggcggccgaccagcatcattatggcgataaaggcaacgactttaccgatggtaatgcccatatcgagggccagggtagccaggccaacgtcgcctttctcggtcatgccggcgaccgccggcagcagcaccagcgtcagcaccatcaccagatcttccacaatcagccagccgatggcgatttgcccccgctggctatcaataagctgtcgttcttccagcgcgcgcagcagcaccacggtactggcggtagaaagacacagaccaaaaacgatcccggtcattaacgaccagcccagcatggcagagagcgccatacccaacagcgtcgccacggcgatctgggcgattgcccccggaatagcgatagccttgaccgccatcaaatcttttaaggagaaatgcagacccacgccgaacatcagcaggatcacgccaagctcggccagctccggcgccagcttggtatcagcaacgaaacctggggtaaaaggtccggccagcacgcccgctaataaatatcccaccagaggagaaatacgtagcttattggcaatcatgccgagaataaaggcgagcacaaggccgccgacaatggtggtgattagcggtgttgcgtggtgcattccgtctccttgcagtggtgagctgatccattttcggcatatacccgtcatacttcaatttgcatgggcgttggctttcctcgctcaccccagtcacttacttcagtaagctccaggggattccctgcgtcgccgccttcctgcaacttgaattatttagggtataaaaccaaaaaccgaataatagtttatgacaatttcagcggttttgtttatgaataatcgttgaattttgcagaaaaatggaattggcatgcaaaaaagcacggaccgcaaaatggcagcagcttatgcggggtaatgctggtggagtaagggattgaggcagccaaagttacactttggctgccgaagaatcaggacttttggtggttgttaggcagaaatatcgtcaggatgccaatcagtggcaagaaagcgcagattttatagaccagctcgatactggtatggtcagctaacagccccagcaccgcggcgccaaggccacccatgccaaaagcgaatccgaagaacaaaccagaaaccataccgatccgccccggcaacagctcctgagcgtagaccagaatggcggaaaaagccgacgcgaggataaaaccaattatcaccgttaaaatgccggtccattccagcgatgcgtagggtaaaacaagagtaaacggcgctacgccaaggatagagccccaaataacatatttgcgcccaatcttatcgcctacaggcccgccaatcaccgttcccgccgcgacggcaaaaagaaaagcaaacagatgaaactgcgcgttttgcaccgataatccaaacttttgcatcagataaaaggtgtaatagctgctgatgctcgccatatagaagtattttgagaaaatcagcagcaaaagaatgctaaccgccagaatgactttgtttttcggcaatggattgacaatgaccgctttgggtttacctttgttcatacggtgctgagcggcataccagcggctgatctgcgccagcacgacgatcgccagcagcgccgccaggacaaaccagccaacgttacctttgccgtagggcgcgataatcagggccgcaagcagcgggcctaacgaactgccaaagttgccgccgacctggaatatcgactgcgccaggccatggcgaccgccggaggccattcgcgccacgcgtgaagactccgggtgaaagaccgaagagccggtaccgaccagcgcggcagccagcagaaccatcccgaagctcccggaaatcgccagcagtaccagaccgcttaaggtaaagcacatgcctatcggtagcgaccacggcatcgggtgtttgtcggtcagatagccgacgaccggctgcagcagcgatgaggccagctgaaaggtgagggtaatcatccctatctgcacaaaggtcagcgaaaactcggcctgcagcagcgggtagatagccagaataagcgattggatcatatcgtttagcaaatgtgagaggctgatagcgccgagaatgcgaaacgaggtgcgtgctttttgcggcgcagcagcagggccggataagggttgtgcggtctgattcattgccataggttcgcttaagtattttttatagaggatgcaggtggaattattatctgcctaacatacctgcccctaaggtttgaaggaagtcgcaattctgaaaacatatttgtctaatcggctaactcgctatactttcggcacttgtcatttcgtcagggagagaaatatgcactttatgaagcaaggcgttgcgctggcgctattcacggcgttatcgctggggagcctgtctgcgcaggcttatgagcaggataaaacctataaaattaccattctgcatactaacgatcatcatggccacttctggcgcagcgactatggcgaatacgggctgtcggcacaaaaaacgctggtggacggcattcgcaaagaggtggcggcagagggcggcagcgtgctgctgttatccggcggcgatatcaacaccggcgtgccggaatccgacttacaggacgcggaacccgattttcgcgggatgaacctgattggctatgatgcgatggcggtaggcaatcacgagtttgataatccccttagcgtactgcgtcagcaggaaaaatgggcgaagttcccgttcctctccgccaatatttaccagaaaagcaccggcgagcgtctgtttaagccgtgggcgctgttcaaacgcggcgggctgaatattgcggttatcggcctgacgaccgacgatacggccaaaattggtaaccctgagttctttacggatatcgagttccgcaaaccggcggaagaggccaaacttgttatccaggagctgcagcagaatgaaaaaccggacgtcattctggccaccacccacatgggccattatgacaacggcgcccacggctcgaatgcgccgggcgacgtcgagatggcgcgcagcctgccggcaggttcgctggcgatgatcgtcggcggccactcgcaggacccggtatgcatggcctctgagaataaaaaacaggtggattacgttccgggcagcccgtgcgcgccggataagcagaacggtatctggatcgtccaggcccatgagtggggcaaatatgtgggccgcgccgacttcgaattccgcaatggcgaaatgaagctggtgcactatcagctgatcccggtcaacctgaagaaaaaggtcacttacgacaacggcgagagcgagcgcgtgctctatacgccgcaaatcgccgaaaatccgcagatgctctccctgctgacgccgttccagaataagggcaaagcgcagctgcaggtcaaaatcggtagcgtaaacgcgcacctggagggcgatcgcagcaaagtgcgttttgtgcaaaccaatatgggacgtctgctgctggcggcgcaaatggcgcgcagcaatgccgatttcgcggtgatgagcggcggcggcgtgcgtgattcgattgaagcgggcgatatcacctataaagacgtgatgaaggtacagcctttcggcaacgtgctggtgtatgtcgatatgagcggtaaggaagtgacggagtatctgaccgccgtggcgcagatgaagcccgattctggcgcctatccgcagtttgccaacgtcggttttgtggccaaagacggtaagcttaataatttgaccatcaaaggcgaaccggtcgatccggcgaagacctaccgtatggcgaccctgagctttaacgccaccggcggcgacggctacccgcatattgataccaggcccggctatgtgaataccggctttatcgacgccgaggtgctgaaagagtatatccagaaaaactcaccgctggacgcggcagcttatgaaccgaaaggcgaggtaagctggcagtaacgtcagagcagcgccccggtggcgctgcgcttaccggggcgacaggtctgagcggttttggattttatagcccggacaaggcgcgtcagcgccgcctccgggagtgttccctgacgaaaaaccgtcaattaatcgcgacgcgcgatatcggcgaattttgcctcaaggatcttcgccagatcgctggccgccagctcaatatccagcccgcgtttgccgccggaaatatagatggtggcaaacgactgggccggcgcgtcaatcaccgtcggcaggcgttttttctgtccaagcgggctgatcccgcccaccagatagccggtgacccgctgcgcgaccatcgggtctgccatatcgactttcttagcgcctaaagccttcgccacctttttcaaatccagctgacccgctaccggcgtcaccgcgacggccagatgcttcatatcgccgttgacggcgaccagcagcgttttatagacctggtcggcgttgagccccagcttacgcaccacctcatcgccaaaattggtttcgttcggatcgtgatcgtagctgtgaatgtgaaaactaattttgtttttttcgagtaattttacggcgggagtcatcgttatccttcttaccaaccgatttaatgtgacataagcatacgcccgacggctgtctaaaaaatagtatcatcttgcgcaatagtattggcagtgatggtcactttgagcgacaatcagacgatccggggcgcgaaccccggaataataataatgatgaaattcctctttgacgggccaatagcaatattggccatttttttacgtcagcatgtccggcagattcccttccccgtacaaatgaagcgcccctacggcaaccacgtagcgccccggcggcagcgccagcagcgtttcgcgccaggcgagattgcgctgatgcatcagcacatcatatagcgactggctaaacgttgtcggcagcgaggttgcgcccgttgacggcggctgctccagccaccagccgatcatcacctgcagcagacgcgcattcgtgcgccagtgggtgagggtatcctccagcagcgccagaccgccgtcgggcagatcccgcagcagcgctatctggctatcggcgccctccagctccatcacgcggatattgctctcacgcgccgccatcagcagttgataatcaatgccgtaatccgcccttagccccagtttttgcgcctgagtcgcctgcaataccatcgccacctgccacagcggctggctgtcgaacagcgcgatggacagccccatttctcctgcccgctcttgcagttcagcaagcagggaggcgctcaggcgttccgccagcggcggacaggaggggaggttgctgaacggcgtttcgctgccgctaatatccgcttccacaatcagcgcatcggcctggcggatcttttttaataacctggcgggcggcggcgacatgtcgcgggtgcccatatgaatactgccgaccaggtgcagatagcgctcgccgggaagcgtgatatccagcgcgggccaggaataagacgagccgacggcggcttgccacagcatttttattcggtttaacaggcccatacgtgctccgtagtgtgaggaagccatgctagcgcgcggggggctggggcgcaaggggactcaacgtgcgcgacggaagaggcgttttgcaatgtcacgaaaataacaaaaaaatttgatgttctctttttcgtcatttctgtaatggcgttttgaaattaattatcacttaaaaaacaatggaatgactatttataacgtgaatgaccatggtgtttttttctcaaatattcctctgttgtgataataaaataaaaaatctgtaacaaaaaataaacaaagcgcttctatattggccccttcaatttttggggggagtgacatgcgtaactggagtgagcctaaaaagaataaagcccatatcgagctgatcccgatgatcgatgtgatgatgtttctactggttttctttgtcctgattagcctgaatgtgatcccggctctgggcttgaaaacgcagctgccgtcggccggcagcgcccaacagcttaaaccgcaaaaaaaagccattatcaccctcggcgccggcgaccagctgcagcttgatggccagccgctgcccctggatgcgctggtcaataccctgaagcaacagcagcaggaaaaccaaaccaccaccattatcgtgaacagcgataaagaggttgcggtggaacgcctgatcgccgtgatggataccctgcgtcagggtggtttcttctccatttccattgccacacggaagcagtgatatgtatctgctttatcgctcacgtcacgttgttagctggctacccgccattgtcgtcgcgggatgtttactgtttgtcagccagcaggcagtgctgcaggtcaaaccgcattatgacgatacggtcatggaactgtcgctggctgaacccgaaccgccgcagccggagcctgtcccggaaccgcagccggaaataccgccgcaaattcaacctgagccggaaccggaggcggtcgctgaacccgtcgttcctgcgccagaacccattatccaggccaaaccggttgttaaaccgaaagccaaacccagacccaaaccggttgtgaaggaaaaagcgtcgaaaccgcaggcgatcgcggctccgcagcccgccgccgttcgtagtccggtgagtaaaccagccgcgccgccttctcccccggcgccgaaggcgaacgcgcaggcggtggaaaacggctatctgcaggcgctgcgccgggagctggagcagcgcaagcgctatccgagcggccgtcaggcttcgctggagcgcccacagggcaacgtggaggtctggctggaggttgaccgcagcggcagagtgctggcttccggtattgccagcagggcgccgaacatgctgctcaatcgcgctgcgcttagttccctgcaaagcatcagccagctgaagccctttcctgaagaggcttttgccggacaaagcagcaaaaaatttaccgcgacgtttaattaccaggcgccataagcctaattaatcatttgtttttacaggaaaagaaatgaaaaactttaattattctgggattgcgttagccgtggtgtcggccctgttatcggggtcctcgctggcggcggaaagcagcgacgtgggggagattaacgttaaggggcaatcgctcggcggcggtctgatggtgcaggaagacagcggcaaagcgcgttccaccctgaccaaagaggcgatggaaaaagcccccggcgccagcaacgctatcgacatgctgaaatatacgccgggaatgaacgtcaacagcaatgacgccagcggcctgagcggtatcgactacaccatgcgcgggatgaactcggatcagatcggcctgtcgatggacggcatcccgattaacgactcgggcaactatgcggtctaccccaacctgctgggcgacgcggaaaaccttgagcagatctttgtcacccagggctcttccgaggctgacggcccgcatattggttccagcggcggtaatattggccttgtgacaaagcgtccctcaaaggagtttggcggcttcgtcaaacaaacgctcggcagccataacctcagcaaaactttcgctcgtctggagaccggggagtacaacggttttagcaactggctctcgtactcgcatactgaagccaaaaaatggcgcggggaggggcgtaattattccgataagttcgaaatgaactcgctgtacgaggatggcaacggcaacagcagcaacctgatcatgaagtataaccgtcaggataacagcaactataacaccctgagtaaagcgcagttcgaagaagacccgcgtcaggactactcgaccaccccggtctacaacagcaaaggtcagctgagcaaatattacaagctgaaccgtaatccgtttgaaaccttcaccctctcttttgcccagcgcttacagctgcgcgataacctcgcgttgaccgttcagccctattactactggggtaacggcggcagctttaccggacaaacggcctcggtgctgtccaatacgtctgataccgccggacagtacgatctcagcaacctgacttccaatacctactaccggccttcgtggacccagacctggcggccgggcgttaccacgaaattgaagtgggatattaacgacgaacacagcctggatattggctactggtacgagcgcgcgcgtcagtcgcagacccagccgtttattagcattcaggacgatggcaacccggcgaacgtttccggcaaaccgggcggttccgatcaggttaaagatgcgaacggcaatacggtacaggggcgtaaccagtacacggtgactcctgcgcacaaagtatggcttcaggacagctggttcgtgacgccggactggacgctggtgggcgggctggcttatcagtatgttgaacgtaaaggcgataataaaggcagcctgtatagcgctgcggaaaaacgccaggcgacctaccatgaattcctgccgaactttagcatcagctataagccggatagcgaaaatcagctgttctataacctgacgcgcaacatgcgtacgccacccaactacgtgctctacaacgtcggcgactcgatcagcaccaaacctgagctgagctggaaccacgagctgggctggcgttttcagcgcgaagatatgctgctgagcgcgacgctcttctatatgcgctataccgaccggcagatttcgaccaccaatgcggatggtgactacgaaatgatgaacatcggcagcgtggagagtaaaggtctggagctggagtggagcggtaagctgccgtacaacttcaactactacacctcttatacctacacccattccgaacaaaaagacgacattgtgagcaacggcggacatccgctgccaacggcgggcaaaacggtgccaaacgtaccgaaaaacatgcttaacgcgtcgctgggctatgacgatggtctctactacggcagcttcggcggcaaatacgtcagttcgttctacggtgatttgaccaacgacgaaaaaatcggcgggcgcacggtctttgatgtcgccgcgggcgtgcatctgccggtggataaaaagattgtcaaaagcgccaccctgcgctttggcatcgataacctgttcgataaacagtacctgacctccgtccgctcgacgacttttaacgcggcggcttacgacggcgtgaaggccagtaccccgtactacaacgttggcgaagagcgcacctttagcgtctcgctggaagccaccttttaattaaccggagggcactctgatggatgccaatctgattcacgatattattttctacgttatgtacgccgcgctggcgatcgccgtggtgatactggttgaacgcggcctctatttttcgtgggcccagcgtcaggctttgcgctttgaaaaggcgctgacgccggacgttcgccgcgcgtcggatctgccggaatcgctgaccggccgcagtagcctcccgctgaccctcattctgccggtgctggagaaaaagcagacggcggaagaccgtgaggcgatgagcgatctgatcgacgctcagtatctgctcagcaaaccgcagatgtcgcgtgggctgtggatgcttgaaaccgttgtcaccgccgcgccgctgctgggcctgctggggacgatcctcggtattatggatacctttaaggccctttccgcctccggcgtctccgatgccagcatggtttctgcgggtatggggaccgccctgtatgccaccggcctgggcattgctattgcgctgctgtgcctggtgggcaataactatttgcaaagccgcatggagcgaatcaacgaactgctgaaggtgctgctgatccgcgccggcagcccggtcagccgtccggagcagggcggcaaacgctgggaaggccacgaggcgcagcgctatgcctgaacatggtcaatgcgggtggccggcaggccgcctgatgagcgcgctggcggggagctggatgctgttaagccagccggtatgggcggcgttctctatacccggctacgagctggtgtataacgcgccgcaggaaaccaccttacaggataacgacttacgtcatgctgccgaggtctggcagcagatgttcgatgcggcgcgcagccatatcgatctggcgcagttttatgtggcgaatgaaaaaggctctctgctggatggggttctggcacgtctgcgggccgccggggagcgtggagtaaaaattcgttttctgatggaggagaagggcgtgggcctttcaacgccggaaacgctgacggcgctgaaagcgatcccgaacctggaattgcgggtgattccgttccatcggctgactggcggtattgttcacgccaagtatctgctggtggatggcaaagaggcttttgtcggtagccagaattttgactggcgcgcgctggaacagatccaggagaccggtctgcgcatcagcgatccgcaaacggtgcagcagattcaggctattttcgatcaggactggcaggcgcaagctctgctggcggagagtaagccggtaccgaagccggcgcggcaggcggtagcgtcggccccgcagggcaattatctggttgccagcccgcgcgattataacccgagcggggtgattgattcgcaggtggcgctgccgcggctgctggcgagcgccaaatcgcggatccgggtgcaggtgatggactatgcgccgctggcgtggggagaaaaggggagccggcccttttatgcgcccattgataacgctctgcgcagcgcggcggcccgcggcgtacaggtggagctgatggtggcgaactggaacctgaaaaagccggaggtattctggctgaagagtctctctctggtgccaaacgttcagctaaaagtggtgaccatacctcccgccagccgggggtttatcccctttgccagggtggtacacagtaagctgatgaccatcgacggtacgacggcgtgggtcggaaccagcaactggagcggaggctatttcgataactcacgcaaccttgagctggtgctgaataatgcgtcgatggccgcgcgcgtggacgcgctttacagccagctgtggaatagccgctatgcggcgccgatcaaggtcgattttgattatccggttccgcatcctggccgcgagttcgaatagataaatcggctgaggcttcccctctcccgaagggggagaggggaagcctgttttcgtcctcgccagaggctgccttatgctttgggcttatagcgcagcaggcggttggcgttgctcacgacggtaatcgaagagagcgccatggccgcgcccgccaccaccgggttgagcagcgttccggtcagcggccacaggatcccggcggcaatcggaatgcccagcgagttataaacaaatgcccccagcaggttctgcttcatattacgcagcgtggctttggcgatgtccagcgcatcggcaacgccgttcaggctatggcgcatcagggtaatcgccgccgtctcaatggcgacatcgctgccgccgcccatggcgatccccacatcggcctgcgccagcgcgggcgcatcgttgataccgtcgccgatcatcgccacctgatgcccttcgctttgcaggcgcttaatcgcatcggctttaccgtccggcagaaccccagcaatcacctcatcaatgcccgcctctttagcgatagcgttggcggtggtggggttatcgccggtcagcatgaccagacgatagccctggcggtgcagcctggctaatgccgccacgctatcttcgcgcagcggatcgcggatggcgaacagcgccgccgcctgaccatctaccgccagcagcaccggcgtggcaccctgtgacgcctgggcggtcatgtcgtcttctatttcagccgttgcaatcttgtgctcattaagcagcgcctggttgccgagcagcagacggcggccttcggcttcgccgctgacccccagcccgcgcagggtgcggaagttttctaccgcaggcaggcgttggtccgcggctttgtcgagaatggcgcgcgccagcgggtggctggaaccttgctccagagacgccgccagacgtagagcggtggactcatccatggcggtaaaggtttttatcgccaccacctgcggtttaccctcggtcagggtaccggttttatcaaagaccagcgtatcgagagtgctggcgcgctgcagcgcatcggcgtcgcgcaccagtacgccgtactccgccgcgcggcccacgccggagataatcgacatcggcgttgccagccccagggcgcacggacaggcgataatcagcaccgtggtggcgatcaccagggtatagacaatttgcggcgccgggccaaaaaagtaccagatcgcggcgctgaacagggctatcgccacaaccgccgggacgaacacggcggagattttgtccgccagctggccgatttcaggtttactgctctgcgcctggcgcaccatgcggataatgcgcgccagggtggtttgactgccgacggcgctggcggtaaacagtacgctgccgtcctgcactacggtcccggcatgaacggcgtcaccgtcgcctttttgctgcggcaccggctcgccggtgagcatcgcttcatcgaaccaggcttcgccctggctaatgacgccgtcgaccggtacgcgatcgccggtggtcagacgcaggatcattcccgcctgaacctcagccagcggcagatctttttcgccttcgtcggtgaccaccctcgctgacggcggggttaaatcgagcagtttttccagcgctttcgaagagcgctggcgcgcgcgggcttccagcatatggccgaggttaatcagaccgataatcatcgcgctggcttcataataaaggtggcgggcttccatcggaaaccactgcggccacaggttgacgctcattgaatagagccaggcgacgccggtacccagcgctaccagcgtatccatggtcgcggtgccgtttttcaggcttttccacgcgctgcggtagaaatggccgccggcaaagaccatcaccgccagggtgacaacaccgatagccagccacagggagcggttatcatcgctgaccatcatattgtcgccgatcattccccagcccatgaccgggataccgaccagcagggcgacgatagcctgccagcggaagcgcttcattgtggcgacggcggtttcctgctggcgctcgcggcgttcgaggtcgtcttcgatagcttccgcgccgtagcccgctttctctacggcctggactaattctgcggcggacgcgctgcccatcaccagcgcagtgcgttccgccaggttgacccgcgcctgcgagacgcccggcaccgcggcgagcgcgtgttgtacccgggatacgcagctggcgcagctcatgccgttgattaacagctgctggctgtcatcttcgtcacgggctgccggaagctcagaggtggccgctgtcagcgcttccggcgggattgatgattctgccagcggtttagcctttgggtggctgagctccgcgccgtatccggcctgtttaatggtctcaatcagcgcttccgcgctggcgctgcccgtgacgtgggcttcggtaacggtgacttccgcctgctcaacgtcgggacgctgctccagactctctttcacccgtttaacgcagtggccgcaggagaggccatcaagcgcgaggtcgatagtggtagacatacataactcctgaataaatttccggttaatgattgaccgaacacactctttcatcgagtattaacaaggttaaaccttccagcaaggggaaggtcaagggggaaagatgaatattagcgatgtggcgaaaaagaccggtttaaccagcaaagcgatccgtttttacgaggagaaggggctggtgacgccgccgctgcgtagcgaaaacggctaccgcagctacagccagcagcatctggatgaactgaccctgctgcgccaggcgcgccaggtggggtttaatctggaagagtgtcgcgagctgatattcctgttcaacgatccctcgcggcacagcgccgacgtgaaacgccggacgctggagaaagtcgcggaaattgagcggcatatcagcgagctgcagggcatgcgtacgcagctgctggcgctggcggactcctgcccaggcgatgacagcgcggattgcccgatcatcgataatctctcaggctgctgtcaccgcaaggcgcaggcttaacgccgcgccgggttgagcataaagaccaccgtgccgcggtagtagggggagtcattcagctgcatttccgcctgccgatcgcgtttgccgttttgcaccagcccgagtttgaacgggatacgcagccggctgagcgcggggagatagtcctgataattcgccaccgtgcggcgtccttgatagctttgtaccaccagttcatcaaccgcaagcgcgttcagtgtggcaatatcgccggttttagcccagtccagcaggcccgttacccccagcgcgaactctggcggcagctgctggcgtagctgttgcaaaaactgggcgtagtcggcgagctgatatgtggctgcgtcaaaatcaacctgcagaccaaccacctgattgccagccgcccgccagcgctgcatcaggcgtacgatccgcggcacaatcgtctgtggtacatcaagtgtggtaaaccggacggtaagccagattgcgggaaacgtcaggcggctgaccggcaggccgaggcgctggaatatgacctcgcccgcgcgcgtcagcacctcgccctgatgcagatataccgtctgcgcgttctgcagatcgttgctggctttcaccccggaccacagccagaaggcggaatgctggcgcgcatccacgcgctccgccgcctgcgctgacccggacagcagcgcgattaccagtaatatttgagtttttgcgcccacgggcttcccggatactgcgttttcaactgcgtgaaccagcccttacgctgcagtttttcgacatcttcgccgccgcattcgttgctaccggagggggcgtaacagagaatcgcccgatagagcgcatagcttttatcttccggctccgctttcggcgaggtgataatctgctggtaatagcgttggcgatcgtactgtcccagaggctgctggcggttgatggcgggctcgagcatatcgttgccggcgtggtctttccacagatcaacatgcgtctgcgtggtgcggaagaactcgcccaggcagttaagcccatgggcatcgtcggcgtttttactgagcacggtgacggtgtcatccaggctgcggcaggcataaccggcttcggtcgcctcgccatcccagtcgaagctgctaaggttgacgtcgttaaaggcctcgctgattaccggctgggtaatagcggtggcgagctttttgtcgttcagccagtcgctgaagcgactttccgtgagatcccgcaccagcagcgtatgcagagcgatagtacgttcttcattattgggaccgttggccgcctgttggcgtagcagttcaggcgaggcctgggttttcagcacttgggagcgaaagcgtagattggtcactgggctatcggcggcaaagatagccgccgcgttaccgctgtagaccagcgttgccgccagttttgcctggatatactgctgttgctcgggattttggctaagttgtagcagctgctgccaaaaagagcgcgccgcgggccactgtgtttgtcccattagcgcttcgccgtagaggacctgttcgctgaaggcgagaatatcattcgccggcagcgttttcgccggcgtgacagcctgcaggatggcggcatcgttgcccgtcgcgctccacagctgcagctgcaggtcgcgccacagcggcagatttccgctcttctcaaacgccgctttgctggcgtcaagctgtgcctgggttaaggttggcttattgtcagcattcaggcgcagggcgcggagaagttcgacatagctgacctgcggcgcgtccgggaatgctgccagaacgggctgcgcgtagaacggcatgccgaagacattatcatattcactcaccagtctacgcagttccccggcgtcggcagcctgccggaaggcctgctcatagagtccggccagctgcggccacgcctgcagataccagttaatgcggcgcagcatattgcgcgcggagtcggcataaagccctgcgggccagcgttgcaaataggcttgagcttctttttgcgcctgtgcggcatcatcacgattgatccgcgcaatatcaaaatcaccgtactgcccgacgctgttctggctacttttgttgagcgccgtgcgcatcagcatatattgcgcggtctcggtcagccagggctgctgactctcccgcaacagagtgaaatcgtgggtcgcggcggtgtaattgccgccatagaagtgggcgatgccggaaaggtaataagcgaataagtcggcgtccgcatctgccgggaagctattgaggatatcagcgactgcggtgatattggcgccataaaacagtttcagccgcgccagcgccaggtcatgacgctgctgcggggtcacagagggcgcggcgagcagggcggcgttgaactggctgacggcggcaagggtgttgctgacaaagcggttttccagttcatagtcggatgttcccagccgttcagccgaatcggccggcatgatctgcgccggatcgatattcagcgccgccatttgttggatgaaggtttcatcttcgcgttgcgccggcggcgcgggaggcggcgcgctatcccactcaggatgccaggcgaagtaaacatcgcgggtacggctgacatcagcgggaatggcctgaacgggcagggcgaaagatttcgcttcgctcagcaggcgcagcaagttgtcccgcgagtcatttcccggtgtcagtacaggttcgccttttagcaggcatagcgggtcgctccacgagcaatcttcgatatcagcagaagcatatgcctgagcggctgccgcgagcagggcgcagagcgaaagggtaaacgttgtcttcctgaccatgacggatgtcctgtggggtgattattgtgatacgactcttatatgtagggttatgccttcgatggcgaccacttcaaccttgctgcccgccgcgaggtcgtcatcggcaataaccggccatgaactgtcgcccacgcggacgtgtccgcggccgttaaccagcgccgtttccagcgtaaagcggcggccaagcagctgctgcccgcgctgattaagctgagcgtccgccggcttctggcgcttaacgcggttacgcagccagcgcgaccacagccaggccgccagcagggtcagcacggcgaacagcgtaccctgccactcccagctcaacggcagcatccagaccagcagcccggttacgacgccggcaatgccgctccacagcagataaccgttgccgccgagcatttccgccgccagcagcagcccgccgaggctgagccagaaaatatgcgggtgggcgagaatcagcgcgatcatgattttttctgcgcgccagcgccttctttaagcagctcgccgatcccggcgatagagcccatcagactgctggcatcgagcggcatcagcaccactttgctgttattggccgcgccaatttgctgcagcgcatcggtatatttctgcgcgacaaagtagttgatggcctgaatgtcgccggaagcgatagcggatgagaccatctgcgtagcgcgcgcttcggcttccgcggaacgttcgcgcgcctctgcctgtaaaaacgccgactgacgctcgccttcggctttgaggatctgcgactgcttctcgccctcggcttttaaaatttccgcctgacgtatcccttcggcctcaagaatataggcgcgcttggtgcgctcggctttcatctgggcgttcattgaggcgataagctccgccggcgggcgtacgtcgcggatctcaacgcgggtgattttgatgccccacgggttggtcgcttcatcgacaatatgcagcaggcgggtgttgatgctgtcgcgctgggagagcatttcgtccagctccatggagcccagcacggtacgaatgttggtcatggtcaggttgataatcgccagctcgaggttgctgacttcataggcggctttcggcgcgtcgatgacctgaataaagcacaccgcatcaatggtgacgttggcgttatcgcgcgaaatcacctcctgcgaagggatatcgagcacctgctccatcatattaattttgcgcccgatacgatccataaagggcaccaccaggctcatccccggctgcagcgtttgcgtatagcggccaaagcgctctaccgtccactggtagccctgaggaacgatttttaccgccgctccgacgataaccagcgcgacgaaaataagaatggggataaaaatcagcatcaaaaacctcctgtcttgttgcctgttgatgcgccgggagagtggcgcgcgtttaaccagagtatatctttccgcgcatccgggtgaaagaaaagtggagtaaactagaggcgttgtcgaaaaactgggaataataatgaccgaaagtaacgctattttgcgcctggacaatgtgggttttcaggccgatggagtgaccatccttaatgagatgagttttcagctcagggcaggggaatttaagctgattaccggcccttctggctgcggaaaaagcacgttattaaaaataatcgcttcgctgctgagccccaccgcgggaagcattttcttcgccggtaaaaacattaatgacttaacgccggaaacctatcgtcagcaggtttcctactgcgcgcaaaccccggcgctgttcggcgattcagtgtatgacaacctggtcttcccgtggcagatccgtcatcaacagccggatcccaacgcgctggtcgccgatctgctgcgcttcgggctggcggagaatacgctggaaaagtcaatcaatgaactttcgggcggggaaaagcagcgcgtttcgttgattcgcaatctgcagtttttaccgcaggtgctgctgctcgatgaaattaccagcgcgctggacgagagcaataaaaaaaacgtgaatgagattatccatcgctacacgaccgaaaaaaatattgccgttctgtgggtcactcacgatagcaatgaaattgcccatgcggatgaagtgattaccctaaagcctgccggcggaaaagcgcaggaggagaaaaaaaatgaacgggcataatattactaacgaatcgctggcgctctccatggttctggtgctggtagcgatcgtggtcagctaccgggaaaagctggcgctggaaaaagatattatctggagtatctgccgggcgattgtgcaactgattatcgtcggctacgtgctgaaatatatctttaacgttaatcacgccgtgctgacgctgctgatggtgctgtttatctgctttaacgcggcgtggaatgcgaaaaagcgcagcaaatatatcgataaagcctttctttcttcgtttatcgcgataaccaccggcgccggattaaccctggcggtgctggttttttccggatcgattgcgtttgtgccgatgcaggtgattccgattgccgggatggtggccggtaacgcgatggtggcggtcgggctgtgctacaacaacatggggcagcgtttcagcagcgagcagcagcagatccaggagaagctgagcctgggcgcgacgccgaagatggcttccgcaaggcttatccgcgatagcattcgcgccgcgctgatcccgacggtagattcggcgaaaacggtggggctggtgagcctgccggggatgatgtcggggctgattttcgccgggattgatccggtaaaagcgattaagtaccagattatggtgacgtttatgctgctgtcgaccgccagcctgtcaacgattatcgccgggtatctgacctacctgaagttctttaatgctcgccatcagctggtggtgacgcagctgaaaaaacgcgcgtaagttttttccccggaggcggcgctgaacgcgcctgtccgggctaccgtcccgcagacggcggggaacctgtagcccggctaagcgcagcgcgagccgggttttttacgattaataaagcagagagtagagctggcggcggtacttcgcggccagcgcgtcgccggtgccgagggcggagaggatctcctgcagcagcttgcgaacctcgccgtttccggcgcctaaatctttttgcagatggctgaacagcagcgccagcgcctcttcgttacgcccaacctgatgcagctgtaatgccagctgggaggccagcgccgcgtcttccgggttctgctctacctgctgctgcagttgctgaatttccggcgtgtcggcggcttttttcagcagctcgatctgcgctaccagtccctgatagcgggtatcctgatcctgcagcggcacggttttcagcaccgtttccgcttcatcggaacggtgcagggcaatcagcgtttccgccagcagcaggccaatctggctctcctggttcgacagctgccaggcgtctttcagcagcggcagcgcttcggcgtagttctcttcctccatcagcgccagcgcctgctgcgctttgagctcctcttcgcgcggcaggaacttatccagcagcgcgcgcaccgcttcttccggctgcgggccttcgaagccgtcgaccggctgaccgttctggaacaggtaaaccgtagggattgcgcgcaggccaaactgcgaagccagcatttgttcggcatcgcagtcaactttagcgagggtaaacaggccgttgtactgggcggcgaggctctccagtaccggcgtcaactgctcgcaatgttggctgcgcgcggaccagaaatagaacagcaccggcgttgtcgcggactgctgtagcgtctggtgtaggttagcttcggtaatattgacaatattctgtgcggacatgagcaagtctctttgatcgatatttgtatagatatatgggggcgacggcaggcgcttcaacttagccctggataattttgtccatcgcgcgggtcggcagcaggcgtttcagcagggcgaccgcatgcgccaccagagtgaccgggtagcgcagcttcggtttatcgctgacaaaagcatggcgcactttttccaccaccgcttccggcccgagagtaaagcgggcggcgatgccggggttttccaccggcttatcgacctgggtctggttgacgttgttggtgaagcgggtgtggatcgggcccggctcaatcaggatgaccttaactccgctgtggcgcagctccatgcgcagcgcatcggaccaggcttccagcgcgaatttgctggcggcataggcgccgcggccggggctggagataattcccatcaccgatgaggtcatcacaatacgcccttcgccgtgcggctccattgccggaagcagcagcatcgttagctgatggacgccgaaaaagttggcggaaaactgctgctccatctgccggcggctgatggtcggcagcgggccgtagacgccgtagcccgcgttgttaaacaggccgtacaggcggttgtcggtcagggcaatcacctcggcggcggcgcgttcaacgctctgcggatcgtcaagatccagcaacacaccggtcagccccagctcctgcatccgtgcgacatcttccgctttgcggcaggcggccagcacgttaaagccctggcgctttaaatcaagggcgctttcaagaccaattccgctggaacatcctgtaactaaaaccgatttttgcataactttacctgcaaatgactcgctgttatcaggagtcatgattaactaagggagccaaacgcgtcgccatccagtcggcgataaacggctgggcgtcgcgattagggtgaattccatcgtcctgcatccactgcggtttcagataaacctcttccataaaaaagggcagcagaggaatatcaaactctttggccagtgccggataaattgcgctaaaggcttcattataacggcggccatagttggcgggcaggcgaatttgcatcagcagcggctgggcgttcgccgctttgatatgctcaataatggtacgcagcgtctgctccgtctgctgcggcgggaaaccgcgcagcccgtcgttaccgcccagctctaccagcacccagcgcggctgatgctgcttaagcagagccggcagccttgccagcccctgctgcgaggtatcgccgctgatgctggcgttaaccaccggcgttttggtctgccacttatcgttaagcagcgcaggccaggcggtattgcccgccatgcgataaccggcgctcagactgtcgccgagaaccaacagcgtgtcggccgccatcgcgcggcaggtaaacaggaccagaaacaggaaaggcaaatgccagcggaaaacatacttgaagttcatcgtcttaagaaatccgtcggtcagggtgagcatcagctttccatccttaccggagttgagctggttgtcaaacaggggcagaccatcgccctgattggcgagtcggggtccggtaaatcgacgctgctggcgatcctcgccgggctggacgacggcagcagcggggaggtttcgctgctcggacagccgctgcaccagatggacgaagaggcgcgggcgaagctgcgcgctaagcacgtcggctttgtgtttcaatcttttatgctgatacccaccctcaatgcgctggaaaacgttgagcttccggcgctgctgcgcggcgaaagcgatagccagagccgcggcagcgcccgggcgctgctggagcagctggggctgggcaaacgcctgcatcacctgccggtacagctctccggcggcgagcagcagcgggtcgcgctggcgcgcgcgtttaacggccgcccggagctgctgttcgccgatgaacccaccggcaacctcgaccgtcacaccggggataaaatcgccgacctgctgttctcgctgaaccgcgagcacggcaccacgctgatcctcgtcacccacgacccgctgctggcggcgcgctgcgaccgacggctgaggctggtggatggccagctgcgggaggaagcatgatcgcccgctggttctggcgcgaatggcgctcgccgtcgctgctgatcgtctggctggcgctgagcctggcggtggcctgcgtgctggcgctgggctcgataagcgaccgcatggagaaaggactcagccagcagagccgggaatttatggccggcgaccgcacgctgcgcagctcgcgcgaagtcccgggcgcatggattgacgaagcgcgtcgccttggtttaaccgtcggcgaacagctgagcttcgccactatgacgttttccggcgatacgccgcagctggcggacgtcaaagcggttgacgacacctatccgctatatggtcagctgcagacccagccgccggggctgaagccgcacgccggcaccgtgctgctggcgccgcgattaatggcgctgctgaatctgaaaaccggcgacaccatcgacgtgggcgacgccacgctgcgcattgccggcgaggtgatacaggagccggatgccggatttaaccccttccagatggcgccgcggctgatgatgaataccgcagacgtggcgaaaaccggcgcggtgcagcccgggagccgcgtctcctggcgctataagtatgccggaaccccgcagcagctggcggactacgaaaagtggctgctgccgaagctggggcctgaacatcgctggatcggcctggagcaggatgacagcgcgctgggtaaatcgctggagcgctcgcagcagtttttgctgctgtcggcgctgttaacgctgctgctggcggtcgccgcggtggcggtggcgatgagtcattactgccgcagtcgttacgatctggtggcgatccttaaaaccctcggcgccgggcgggcgcagctgcgcaagctgattgtcggccagtggctgatgctgctggcgctggcggtggttgccggcggggcgatgggcgtcgggctggagcatattctgctgctgatgcttaagccggtgctcccggcggcgctgccggcggcgagcggctggccgtggctgtgggcgatcggcgcgatggtggtgatttccctgctggtcgggctgcgtccttatagactgctgctggcgacgctgccgctgcgggtgctgcgccaggatgtcgtcgccaacgtctggccgctgacgatctatattccagtagtgtgcgcggtggtggtagccctgctggcgctgctgatgggcggcagccccctgctatgggcggtgctggcgggggccgtggtgctggcgctgctgtgcggcctggcgggatggggcgttctgtggctactgaagcgtttgacgttaaaagcgctgccgctgcgcctggcggtgaaccgtctgctgcgccagccgtggtcgaccctgagccagctggcggccttttcgctgtcgtttatgctgctggcgctgctgctggtgctgcgcggcgatctgcttgaccgctggcagcagcagctgccgccggaaagtcctaactatttcctgattaacattgcgccggagcaggtggtaccggtgaaaaccttcctcgtcgaacatcagacccgcgccaccgagttctaccccatcgtgcgcgcccgcctgacgcaaattaacggtcaggtgacggagggcaataaagatgaagccctgaaccgggagcttaacctcacctggagccgcgagcgtccggatcataatccgctggttgccggtagctggccgccgaaggcgggcgaggtgtcgattgaagaggggctggcgcagcgtctgggcgtcaagctcggcgatagcgtgacctttaccggggatactcaggactttagcgcgaaggtgtccagcgtgcgtaaagtcgactgggagagcctgcggccgaacttcttctttatcttcccgcagggggcgctcgacggccagccgcaaagctggctgaccagcttccgctgggataacggcaacgggatgctcacgcagctcaaccgcgaattccccaccgtcagcctgctggatatcggcgcgattttgcagcagattggccaggtgctgacccaggtaagccgcgcgcttgaggtgatggtgattctggtgaccgcctgcggcgttttgctgctgctggcgcaggtacaggtcgggatgcgtcagcgttatcaggagctggtggtctggcgcacgctgggggccgggaagtctctgctgcgcaccacgctgtgggcggagttcgcgctgctgggcgtggtgtccggcgtcgtggcggcgattggcgctgaggtggcgctggcgctgctgcaaagcaaaatttttgacttcccgtggtctccggactggcggctgtgggtgatgctgccgctgtgcggggcgatactgctgtcgctgtgcggcggctggctggggctgcgtctgctgaaaggtaaggcgctgttccgccagtttagtcagggatagggttagctatgtagcccgggtaaggcgttatccgccacccggggggtcactgtatgcgggaaagtagcccgggtaaggcgtcagccgcaacccggggggttacccggtacggatgcgcgttgctattgcagatgaccgtggttcagcgcggtgagcggctcattaacatcgaaaattttgcagataacctcgtttacgccgagagatttcagacgcgcggtgtgcttgttgagataagcgagcgcggtttcttcattcgcaaaaagatagatcccgcccgcctcctgatttttttcgctttccgtccagaccttccagataaaacccggctcctgattgatggactcggccagctccacgagctgacgggacatctcgctgccgaagggaccgttaaaggcaaagtgcagctgcagtagttttttcgacatacttcctccatggatgatgtttgcgcggtaatagaccattttaatgacatggcgatgaaaagataaccacagtttttttaacggcacaaaatggtaagtcactgatttttaaccgcacgaaacattaaaaactcaacaacacgccatactcgaacgcagttaatattcaactggcaaatataaggttgcttattaatcaaggaaaaagtatggcacataaaataaaagcgctggcgataacgatcggcgcagccctggcgttaacctcttttgcatcccaggcggaaattacgcttttaaaacaagatccacaggcgggcgatccgttaagccggcttaatttcaccgtcggcggcagcatccgtccccagttcaacatgatgtccggcgacggagacaaaggctcttataaacgtaacggcttcgatggcggtacccgtttccgcttcgccgccgactactatctgttcgatgatattagctggatcagctactacgagctgggcgtcaatattccggcgcttttcgactgggataaccactacgccgaaggcgcgaataacaccagccgccgtatgctctataccggcctgaaaagcgatacctgggggacgttaacctacggtcagcagaacagcgtttattacgacgtggtcggggtaaaaaccgatatctgggattacgacatgataggccaggcgccgggtaacggcatcaacggcgactacgatggctcctatcgctcacgcaatatgctgaaatataagaaaaccgttggcgatgtcgatctttacgcctcttatctgtttgaggacagcgaatatctgccgggcaacggcctgcgctacaaacgtaaaggcggtggttccatcggcgccgattaccacatcatgaaggatttgacctggggcgcagcgtggaactatacccgcgccgatatgcgtaacccctccagttcagacagcaaatcatacgaccagaatatcgtcggtaccgcgctaagctggacgccggataactggaccttctccttcggcggcggctggtatcagaacttcctgaccaccaaaaaaaccgatgttcataactacttcgcgggcgatgcctggggtattgagtactttgccggttataaattcccgattggtcagtatgcggtgaaatctattcagccgtactttatgggcgaccgcctgcagtacgtgaacggccgcaactatcagcggattgataacggcgtcggcgtgagcttccagctggattatggtttccgcgttgactatgaacacgtcttcacgtcgagcaccgacaacctgggcgatatgaacctggtgcgtctgcgctacgacttctaagcgctgacacttccccggtgacgctgcgcttaccggggctacaggttcatcgccgtctgcggacccgtagcccggctaaggcgtttacgccgcaagccgggacaggagagaatgtgattactccgccagccaggcggcgacgtcctgccagctgccgcgaaaaataatcttctccgcttttttgccgagctggtagcggtacatcggatcgtaatactcgttcagcaggggaaccagccagctgaagtgggcttcggtgctggcggttcgctgctgctcaagcagggcttcatcaagccgggcggtgagctgggcaaaacgctgtaacccaaggcggcggcggatcgcgaacagaccatgatgcagatattcgctatacgcctgccagccttgctcttcgccgtaggccgccaggaaatcatgatgcatgcgcgcaaaatactcttcccgcagccgttcaagacggacagcgaacggatcttccaccaccgccagcggcgactgcgccatgcgaaggcgcatgcactccggcaggtgattggcgccaatcatatgcccctcatcctccagcacccagcgcgtctgctgccctgactttttgagcattgccacggccaggtgattttcaaaggttgcctgctgatgctgctcctgcagggttcggccaaatgaagagccgcggtgatgggcgagcccttcgagatcgataccgtccggttgagcgccgaccagctgggttttaccgttaccggtacagccgccgatcagtacgatagggcgctgcaccagctcttcggtaagctgtatcgccgcctggcgcagcgctttgtagccgccgacgatcagcgggtaatccacgcccgcttccttcagccactgctggacgatatgcgaacgctggccgccgcgagcgcagcacaggtagccctcgggatagcgcgcgcaggcctctttccagacggcgaggcggcgggcgcgaatctcgccgttgaccagctgatggcccagcgcgagggcggcgtccggcccctgacgcttatagcaggtgccgacggcggcgcgctcgtcatcgttcatcagcggcaggttgatcgccgcgggcatggcgctttgcctgaattcaaccggggcgcgtacgtcaatcagcggcgtatcgctggcgagaatctgccgaatattctgtggtactaattccatcatttaaaccgttatgtcattcagacgcgtcgctcgacgcgataattcttctattgtacgcggtgagcgccctgctgaattgatttttcacggtgtatcgctgaatagcgtcaggaatggctggatttaagcatccgtggggctggcaagttgggtagcccggctaaggcgcagcgcgccgcaagccgggataaaggagagaggattacgccagctgcgcctgcgcccagaagataccgctggcatattccggcggcagcagcggcttcagcgcttccagcgtcgcgctcaggcggtcggtatcgctgtcggtcaggttcaggtggccgactttacgacccggacgtacctctttgtcgtaccagtgcagatgcaccagcggcagcttcagccagtcatagttcagatcggtaccgatcaggttgatcatcaccgacgggctgtttaccaccggcggcggcagcggcagatcggtaatcgcccgcagatgcagctcgaactggctaatggaggcgccgttttgcgtccagtggccgctgttgtgcacgcgcggcgccagttcgttaatcagcaggccatcagcggtgacgaaacactccatcgccatcacgccaacgtagcccagctcatgcatgatcgccgacagcatctgctccgcctgcgcctgctggcgggcattggcctgcggaaaagcgacgctggcgcgtaaaataccgtcctgatgcaggttgcgggtcagaggatagaagaccgtgctgccgtcccgggcgcgagcgccgaccagcgacacctcgccggagaagttaatgccctgctcaacgatacactcgccgtagttatcctccggcagctgcgcggtttcattttcccgcaaacgccactggccgcggccatcgtagccgccgacgcggcgcttaacgatagccagctccccgaggcgggcgaataccgcaggccattcgcttttatccgccagaagctgccacggcgcggtggcgagcgccagcttatcgaacaactgcttttgtgtcaggcggtcggcgattatcgggaaaacgtcgcggttaacgaaggcggaatgacgcgccagctcgcgggtcagcgccgtttccggccagcgttcaatctctgcggtaatcacgctttgctgtaccggcaccgcttccgggtcggcttccagaccgaccggccagaccgcgatacccagcggctcgccggcctggcgcagcatccggccgagctggccgttgccgagaacgcaaacctgcttcatgccgcaccccgcggatccgggttatccagcacgtcatcggtttgcgcctgacgccaggcgctgaggcgctggtgcagttccgcatcgtgctgggcgaggatctgcgccgccagcagggcggcgttggcggccccggctttgccgatggccagcgtacccaccgggatgccgcgcggcatctggacgatggagtagaggctgtctacgccgctcagcgccgcgctctgaaccggcacgcctaacaccggcaccagcgttttcgccgcaatcatgcccggcaggtgcgccgcgccgccggcaccggcaataatcacctgaaaaccgttttcttccgcgccttcggcgaagctgaacagtttatcgggcgtgcggtgggcggagaccacttcgacatggtacggaacgttcagggcatcaaggatttctgcggtaaactgcatggtagcccagtcgcttttggaccccatcacgatggcgatacgcgccgaattattgcgggaagacatgcgtcttaaaactcctgtgggtgtgtttcacactgctttagaggccacagagaatagcatgaactcccggcaaggaaaacggttgcgtgcgcatggccagccgcctttgtgttgtcggtattcgatgaaacgcgccggttatgagcgggcaaaaagtaaaaccagcccccgtccccgggtcagcataagaatgcccatcaccagcaggtagatttgcacaacgcgctcatcgtgcggcccggataaatcgcggaaaataaagaatcagcccttgccgggggctagaaaggaaaatgaatcagctcaacgtcttctggcgtcactttgaccatagagccctggctatgccaggcgccgagcaccacgcgatacgcggattgaccgttggcttctagcggatggacggcaggacggtgcgtatgcccgtgaatcagccattgaacgtgatgtttttccataacgtcaacgaccgcctggggattcacatccataatttccatcgacttgctgctgttggccgctttgctgtcggcgcgcattctggtggcgatacggcggcggataaacagcggcagggccagaaacaggcgctggatccagggattgtgcactttcgcgcgaaacgccagatagcctgcatcgtcggtgcagagggtgtcgccgtgcataatcagcaccttgcgcccgtagaggtcgagaagcttctcttccggcagcagggtcatcgcgctttcgcgggcaaagcgcttgccgacgagaaagtcgcggttgccgtgaaggaagtagcatgggacgccggaatcggccagcgctttgagcgctgcggcgatttgccgatgcagcgggttaggatcgtcatcgccgatccaggcttcaaagagatcgccgaggatatacagggcgtccgccctgcgggcttccccctgtaaaaagcgcagaaaaccggcggtaatcgccggttcttccgtttgcagatgcaaatccgcaataaaaagtgtcgccacgaattattcgctaacggtgacgcttttgatcacaacatcttctttcggcacatcctggtgcatgccgctgcggccggtggcgaccgctttgattttgtcgaccacgtccatcccttcaacgacttctgcgaatacgcagtagccccaaccctgcaggctttcgccggagaagttcaggaagtcgttatcggcgacgttgatgaagaactgcgcggtggcggagtggggcgcctgagtacgggccatcgccagcgtaccgcgggtgtttttcagaccgttgttcgcttcgttctgaataggagatttggtggttttctgattcatgcccggctcaaaaccgccgccctgaatcataaagccgttgattacacggtggaaaatagtgttgtcgtagaaaccttcacgacagtagtccaggaagtttttaactgtttccggcgctttgtcgtcaaacgtcttgattacgatatcgccatgattggtgtggaaagtaaccatttttgcatcctgttccgatgattgtggtgcctgcacccggagtcgggtgagatatagggggctgttatagcataaccgcggggttggatcaccttgcaatgtgtgctgcttcggggttgaattaaggttagaatacgcgacttatatccacacacgtctacacggaatcttcgatgttaaaaatttttaatacactgacgcgccaaaaagaagaatttaaacctatccatgccggggaagttggcatgtacgtgtgtggtattaccgtttatgacctctgtcacatcggccatggccgtaccttcgtctcattcgatgtggtcgcgcgctacctgcgtttcctgggctacaagctaaagtacgtgcgcaatatcaccgatatcgacgacaaaatcattaagcgtgctaatgaaaacggcgaaagctttgttgcgctggtggatcgcatgattgccgagatgcacaaagacttcgacgcgctgaatatcctgcgcccggatatggagccgcgggccacccaccatatcgcggaaatcattgagattaccgagcagctgatcgccaaaggccacgcgtatgtcgccgacaacggcgacgtcatgttcgatgtgccgaccgacccgaactacggtcagctgtcgcgtcaggatctcgatcagctgcaggccggcgcgcgggttgatgtcgttgacgtcaagcataacccgatggactttgtgctgtggaagatgtcgaaagagggcgagccaagctggccgtcgccgtggggcgcgggccgtccaggctggcacattgagtgttcagcgatgaactgcaaacagctgggcaaccattttgatattcacggcggcggttcggatctgatgttcccgcaccatgaaaacgaaatcgcccagtccacctgcgcccacgacggcgagtacgtcaattactggatgcactccgggatggtgatggttgaccgcgagaagatgtcaaaatcgctgggcaacttctttaccgtgcgcgacgtgctgaagttctacgacgcggaaactattcgctacttcctgatgtccggccactatcgcagccagctgaactacagcgaagagaacttaaagcaggcgcgttccgcgctggagcgtctgtataccgcgctgcgcggaaccgacaaaaccgcagagccggccggcggcgaggcgtttgaggcgcgctttatcgaagcgatggatgacgattttaatactccggaagcctattccgtgctgttcgatatggcgcgtgaggttaaccgcctgaaaaccgaagatgccgccgcggccaacgcgatggccgcgcatatgcgcaagctctcttcggtactggggctgctggaacaggagccggatgccttcctgcagagcggcgcgcaggcggacgacggggaagtggcggcaattgagtcgttgatccagcagcgtctggacgcccgtaaagcgaaagactgggcggcggcggatgccgcgcgtgaccgtctcaacgagatgggcatcgtgctggaagatggcccgcagggcaccacctggcgccgtaagtagtctcattctctctttttagccggggccatccccggcatttttttgccctgactcaggctaagaaacgaagcgcggtcctgatttcgcctgcgttcgttcccggccagcggctgcagcgttcgtcggggagaagaggtatcaggcggaagtgcaggttgccggaggcagccaggggagcggctgtgctacacaggacgtgatatcggaagatggcggcgctgactgaagtgcagaaaaacgagagatcatctgtcggggtggggggacaggcgccggctgcggcgcctgaacgtgttactcggtaacggtaacgctctgaccttcaaagctgaccgtctgaccggcgacgattttacagcgtttacgggtttccaccgcaccgtcgactttgaccagaccgtcggcgatagcgattttagcctgcgcgccgctttcgctccagccttccagcttcagcagatcgcacagttcaacgtgcgggtgtttgcctaaagaaaaattcgccatctcaggcctcctgaatatcgtgatactcttcacacgcctgcagcgtgttctgaatgagggtggctacggtcatcgggccgacgccgccgggaactggcgtaatgtacgatgcgcgcgcggcggcatcttcatagaccacatcgccgaccactttgccgctttccaggcggttaatgccgacatcgatcacgatcgcgccttctttaatccattcgcccggaataaagcccggtttaccgacagccacgatcagcaggtcggcattttcgacgtgatgacgcaggtttttggtaaaacggtgggtgacggtggtggtgcagcctgccagcagcagctccatgctcatcgggcgtccgacaatattggaggcgccaatgaccaccgcgttcaggccgtaggtatcaatgttgtaacgctcaagcagcgtgacgatcccacgcggcgtgcacggacgcagacgcggcgcgcgctggcacagacggcccacgttatacgggtggaaaccgtcaacgtctttgtccggcgaaatgcgctccagcactttgacattatcaatgccggcgggcagcggcagctggaccagaatgccgtcgatggcgctatccgcattcagggtgtcgataagttccagcagctccgcttcgctggtggtttccgggagatcgtacgagcgggagacgaagcctacctcttcacacgctttgcgcttgctgccgacataaatctgcgatgccgggttgctgccgaccagcacgacggctaaccctggagcacgaaatccggccgcaacgcgcgccttcactttttccgcaacctcagagcgtacctgctgcgcaatcgttttaccgtcaataatttttgctgccatcagagagaggattccatctgtatctttacgaaagggggatggcgatattttgtcagaagccagccccgctgtcagtcttcgtttaagattttatctttctttggcgttgcagaggctgaaaaacgggcctgaccgcgctgcgaatggcgcaaaaaggatcccgggagtcgaagaaaggttaacgtgcagaaacataaggttggataaactttatactgcttttgcggcataagccgccagcctgcacaggcaagcgcagtttcgcggcaaaatacattgactcatcaggcgtggaccgtataattccggcgattgcacatcatgaagctcgcttctcaatgcgcccttagctcagctggatagagcaacggccttctaagccgtaggtcacaggttcgaaccctgtagggcgtaccatttaaaatcaataagttattaacttcctcctctcgctgatgttttctcatggaacacatttgggacatcttctgcaaaaatcgagtcaatttgccttgcgtgttccgttaaatggttaggcgccagctgggcataacggcgtaccatttcgatgctttcccggtagatcaaaaaaacacaatagtctggcaagagatcaatatgtagataatacgaacacagaatgtgtatatctatgtaagatcattatattcaattggttaaaaaggtgttgataattaatatcattaaaaaaatataaaaactttatacaattctaactaaaacgataaaaacaacaaaaaatattactaaccagtgcaataaggggaagcgaagtggatgacgttccctggcgccaacgctttgatacactaaatcattgcttaataaaaagggggcgttatcttttcaaagaaactacctggcgggtcaacatgatgaggtaaaaaatgtatacacctgatgcaatgaagctatcagataaaaagcatatttttgattttattgacacttatagctttggattagtcgtttcacccaccctcaacgccagccattttccttttatcctcgatcgtagttcttcatcgcagggaattcttctttcccatatggcccgtgcgaatcctctatggaaagactttgacggaaagagggttctcgccatatttcaagggccccatagttacgtttctccaacctggtatcaaacttctcccgcggtgccaacatggaactataccgccattcactgttatggcacggtaagccttgtacccgtcaatgaattgcgcacggtgatggatgcgttagttcataaacatgaaccaacccttcaggcgcagaaagacgttatgccaaaggcatttatcgaagaaaattaaaaaatattattggattcaaaattgaaattgaggagtttcaggccaaagaaaagctggggcagcatcgttctcaggccgatcagcgaggaacgctgcaggggttaatcaacagccaatcttcagagtccgttgcgctggctgactatatgcttaaggtgaagaaaggtactggcgtttaaaagcgatacttcgctctattatttatgttggaggaaaatacttacaccttacgtaatgtattgaatcaaccatcccggaaaaacgtactcgcgagcggcttgtcggaaggataatgaaattgaatttgagcgccgcgtttatcagaagaaagcatagggaaacgccgtttaaatcaggggtgagttcggttaaacccggcgacttacgccgccgggaacgccattacttcattgctccctcaaggataagtttgtcattttctccgctggtaatgctctgctgatgaaggctgtcagcgagcgtcacgtcattgacggcgaaaaaagcccaggcctgcggcgtattggcgaacgtcacctcatcaaactgactgtcgtgcaggaaggagatactggtcgctttggtattacggaagctgacgttggaaaaacgcagattctggtgataggcatcgcgagaataggtcagcccaaatgattctgccatttcggctaccgtcatgccgtcaatcaggatgctgtgcttagccgaagtaccatcgacggtgacgtcctgcacctgaacgtcgcggaactgagcgggctcgtcggcaggggtcgtatcattcacgtcggcgctgtatttgatagtaaaaacgaacggctctttggcgatatctttcatcgcattatgacggaacaacacatcccgcaccccaccgccatagtaggggcggcttttcatgcgcaggccgacatcggtcatatacatgacgttatcctcggcgcggacgttttcgatccacgcgccggtgtggctaccggtcaccacggcgccgtggcctttgcggaaatagttattaaagatccacgccccgctttgcggctgttgatgaaacgttttcgcgcctttaccaaacccggcggcgaaattgacgcaatcatctccggtatcgaagaagttgttgaaaaccagcgcattctggctattgccgaactcgacgccgtcggcgttattgccgtcaaaggtctggtggaccaggccattgagggtgatattttttgactccagcaccatcacgccgtgaaaggcggggttgcggatcgtcagcccggcaagatagaggttctgcacgccgcgcagggtcatcaggctggagcggcgatttttataggcgctattgctttcgatgccttccgcaatagccgcttcggtctgatgctttgccagaatgccgtccgcgctgacttttgccgcattgctggcccggtattgcggcagcgcgttccccatttcgtcgatgatggtggcctcgccgccgcttttgacgccccgggtccagccgttgccgtcaatcgtgccttgaccgacgatgcgaatattgcgaaacgtcccggccggagactcgcccttatcgtccgcttccagcacgttaattaatgacggcgggcggcggggctgcggatggtcgctgtagggatagaggtaatagcctttttccagcgggtactgggccggatcgtctgaacccagcagagtggcgccagcggcaatctccagggtcatatcgctgtgcaggaacagcgcgccggttttgaattcgccgtcggaaatcaccaccttacagccctgaggatagtgcgcgacggtgcagctatcgatcgcctgctgcagcgcctgggtattcagcgtggtgccgtcacccttcgcgccgaacgtgctggcttcgatgatgtgcggcgttttgctggtccgcgctttaatcaccgcgctatccggcgactctttgccattggcgtagaccgcgcgcaccgtaaatgcgtattccgtatccggctccaggtgggtgaccgtaaaggtacgcaagtcgattggctgctgccagccgtcgctggcgacccgctgatagaagttatcaatatagggtttggccggtgaaaaatggttttgattttcgcgcgccagacccagccgctcgccctgacggtaaatcgcgtagtccaccacctgctgcgtctctgattccggtttttcccaaaccagcaccaggctattttcatcggcagaaagcgcgggaacgaagacattctgcggcgcggaggcgggcgcatcctgctgattgtcgcgggggccgccgctgtcattacagccgcccgcgaggccagccagcgcgatagccagcgccagcatactgcgtgaaggtccaaaggtattgcgcataaatttcccttaatgtcatatcgcctgtaaaaaacaaaatacaaattcatttaaaataaaatgacattttatatttatggcaaaaaataaacgcgagtcagttcaatctttcagcaggtgaaaaataaagcgttgttggataagaaaaggcggccagggcgttaacctccggcccgctttctctttacggcgcggaatattgaatacgatagccatgcgaggtcggtacgatatgcgcaaatcccgacccgccaaggtgcataccggcaatcagcaggttttcgctgacggcctgggcgaggatcgcttcccgcgtcgctctggcctgcgcgggatcgcaatcaaaagcaacggcggcggcgggtcgggcggtctgaatatgcggaaaatggacgatgtcgccccaaatcagcaggctttgcgccgcggcgtcgatgcgaaacccgctatggcccggcgtgtgcccgggtagccatagcgggcggatacccgcgacggcctcgcgctcatccagaaaaccgaggctgcgggaataggcgtccagggcgcggcgggcgagcgtgaagttgcgctgcccccgcgcattggcccggtttagcatggcgtcgtcctgccagtactcggcttccagagggtgcagataaagacgggcgtggcgatagcgcggcgcgccgttggcatccagcaggccgccgatatgatccgggtgagcgtgagtcagcaggacagtatccacgtcgtctggcgcactccccgccgctcgcagactggtttccagcacgccgcttcccgtacccgcgtcgaccagaatcgtccttccccgaccgcgaataagatagccactaatgtcgatattgccggggtcaatgacgcccgcgctgcgctgaatgtctgcggcatcgtcgatattaatacccgacagcagcgccaggccagcggccatgctgccgtcgctgaggggcgtcacctgaaaatcgccaatctggcgggagagaaaagcgggtttgtgcatatcaacctcttagcgtgatgggggctgtatttcagtcgggctttgcaactgaccggccatgggctcatacatcgagacgttttcccgtcccgccagcagcatgccttcccggcgcggcagaacgtacgccacgcgctgcggcgggttgttatccagcccggcggccgaaaggtttgtcggcggatatcccagttccgactcaacgacgtccagcggctcggggctcagtagcaaaacatccccctcagcgacggcgggaaagacgccgccgtagcgatacaggtttcgccgccagtcgcgaatatgcgcctgccagcgggaaaagctgccgccgcctttctggcgatacgcttcactggcgagcgtatcgccatgctcgatggtatgaatagcaagatagaccgggcagccggaggagagcgccctgaagcgctgcgaggcgcggaatccgctgacggacaccagcgcaggcagcttgtcctcgctgtaaaacctgttccagccggcttcgctttgcgggtcggcgtagctgcactcaacgatatataacatgggctgacctctgcatgatggaatgatgttattgacgtttgatcatgctacgttgggcattaagcgctataaaacgatattatttcaccactcaatgacatttcatcattgataaaccttcagcagaggcggcgttcgtgcgaaaaaaactccccagcagtacctcgctgcaggcctttgaggctgccgccaggcacggtaactttgcccgcgcggcggaagagctgtcgcttaccgaaggcgcgatcagccggcaaatcgcccgcctggaatcgctgttaaactgcaagctgtttgagcggactgggagccgggtgcggctgaaccccaacggcgcgcgctatgcgcaccatgtccgcgagacgctggagcgtcttgagcgagatacgcagtatctgatgggggctgcggacggcagccgaagcctggaaatcgccgcgccgccgacctttgccagccgctggctcattccccgactgggggattttcagcgccggaatctggatatcacgctgaatatcgcggtcagaaccgacccgtttatcctcaccggcagcggttttgacgcggcggttcatttcgagcatcccgcatgggcaggaatgcgcttgcggtttctgtttgaagagagactggtgccggtatgccacgccgggctacttacggcagaagatctcgccagccagctgaacgcgctgccgcgtattcatcgacggcagaatcctgacgcctggcagcgctatgctgaagagtgcgggattgcgctggataatccggcgcagggcgtgcgctacgatctgcatgagatggcgatagccgccgcgctggccgggcagggcgttgcgctggtaccgcacgtgtacgttgaaaaagcgctcgaaaacgggacgctggttgcgccctggccgcaggcccgcagcctgagcaagcgcttttgcctggtgaagccgctggaaaacggcgtcaacgaatcggcgctacaggcgtttgaacagtggttattggcgcaataaggcccggtcgcgggccgtagacgcgttaagcgcagcctcaggcgtgggataaaagcgggaacatcagcttattctctttgaagatattttctttttgtccgtagataaacagaatatcttcgccttcgattttttcatactcgccggtccgattctctttgggggtaaagccgaggatagcctggtacgtattttcatcggcgagctcgttaataatggccgacagggaacgtccgctgtcgcagaaaatatcaaaacagatcagcgccggaccgttttgcatcgcaatcgcgatggcctggtttttgtcggaataatagacgaagtgcttcataaaggcggagcagtagaacatcaataaaccgaagttatcctctacccgcagctgtgaaaacggattcgatttttgatagtaccgctgtaatcgcgcaacctcttccggctggtccatatcgagcttgcggaagtcgcccgctgccggtaccaccggcataatatattgatattcggcggtgcgctcgaagccaaatttcggataaaaatcaacggttgtcgggttagcaaacaggaaaaaggcgtcggccttatcctgccagtccgtcagaatctccctgacgagctgcccggccaggcccttatcacgatgatcgatatcggtcatcacggtgccgatttgaatatagcggcggggttcgccctgccagatcagatcgataatattggcggaggcgttagcaatcactttattgttgctcaccagggcgtagggaatataggcgtcggtccagtaccctttgcggtaccactctttaaaggagagatcgaaggttttaatcgccaggtcaatgaagctatttcttaacacgtcattgtgcacaatttgcttatctaatttgtagttcatcgtcgacattccttacgctgcgggtgaggcactgttttcggccatctgttcggcggtccgatctctgtcgggcgagctaaaaatagcatatccccacggatgggcgacgattgtcgcgcctaagctttgctcaggtcacacattcggggaaaatagggctaaaaatggcgcacttttgtcgcccagggaacatcgccctcaggcaaaagacgcctttagcaaatgaaagtttgccagtcatcaaaaacgaagaggaatatattgcgttcatggtcatgacccctatcattaataggtagggtaaatgtggtatcatcgcgcctttcccttttcgtcctggggctcttttttatgcaacaacctgttgttcgcgttggagaatggctggttactccctctgttaaccaaattagccgcaaggggcgtcagctaactctcgaaccgcgcttaatcgatcttctggttttctttgcccgtcatcccggcgaagtactcagtcgggatgagctcatcgataatgtctggacccgcaacgttgtcaccagtcacgtcgtcacgcaaagcgtttccgagctacgtaagtcgctgaaagatggcgacgatggcagccttgaatatatcgctaccgtacccaaacgcggctataagctgacggtgccggtgatctggtgtaccgaagagggggaggagccgacgccggttatccccgcagaaacgcagacggtcgggtttgacgcgccgttgacctccccgcagcccgatgcggctgcgccagacagcacagcggtggcgaagccggaaaaacgcaagcggctgagcacgtttatcgtctggggtctgttcctgctggccctcgcgagctgcgtggcgctggtggccctgtcaaccctgcagtcgcgcccgccggtcacgaaaacccggctgctgcttaacccgcgtgatgtcgatattcacctgctcagcggcaacacctgcaacaactggtcatcgcagcactcctatgccatcgggctggggagcctgattaccacctcgctgaacaccttctccacctttatggtgcacgacaaaaccaactacaacatcaatgagcctagcagttccggtaaaaccctgaccattgagttcgtcaaccagcggcactatcgcgcacagcagtgcttcatgtcggtgaaggtggtggataacgccgacggctcgaccatgatggataagcgttactttgtcaccagcgacaatcagctttcgattcagaacgacctgctgagcagcctctctgaggcgctgaagcagccgtggccggcgcggatgcaggagatgttaaagcagtatcagccgtcgcaaagtatcgcgcttacccatttctatcaggcgcatcagctattaatgaacggagacgttgattcgctgggcaaagccagtagcctgcttgccgacgtgaataagcagtcgccggactttacctatgcgtgggcggaaaaggcgctggttgacgtattgcgccattctcagcagccgctggatgagaaacagctcgccgatctgtacagcgaaataacccgggtgggtaatatgccggggattaaagatatggcaatattttatcagattaaaacggtggatatgctgggcaaaggaaaagtggatgaagcctatgacgcgattaatgccgggattgatctggaaatgtcgtggatgaattacgtgctgctgggcaaagtctacgaaatgaaagggcagaaccgggaagctgccgatgcctacctgacggcgtttaatttacgcccgggtgagaatacattttactggattgaaaacgccgtattccagacctccgtgacccgcgtggttccgtatctcgataacttcctcgcttcagaataagtaaaccctcatcatggtcatggttttggccgtggtgaggttaaaattatgtttctcatgagccaccgggttgttattttttataacctctccggttccgcatgtaacactttttcaacatgaagttgacctcataacccaatgaaaaacatctaaatttaccttttcctgatatcaacatgtcatcctgatatgttgcgcgaaaaaggtcaaaatatcatttgtctgatgtttgcagttatttcactttatctttaggacttatctcgtactaatccgtaatcttgttggcagttggtcgggtcaataaaaggttcatcatcatgatctgtacctcccaaataaacttaggagaaaagcaaacatgagttctgccaagaagatcgggctatttgcctgtaccggcgtagtcgccggtaatatgatggggagcggtattgcattattacctgcaaacctcgctagcatcggtggtattgccatctggggttgggtgatttctattattggcgcgatgtctctggcttatgtttatgcccggctggcgaccaagaatccgcagcagggtggcccaattgcctacgccggtgaaatatccccagcgttcggtttccagaccggcgtgctttattatcacgccaactggatcggtaacctggcaatcggtattaccgccgtctcttatttatcaacattcttcccaattttaaataacccggtgccggcaggtattgcctgtatcgccatcgtatggatattcaccttcgtgaatatgctcggcgggacctgggtgagccgcctgacaacaattggcctggtactggtacttattccggtggtcatgaccgcggtggtcggctggcactggtttgatgccgcaacctatcaggcaaactggaacacctccagcaccactgacagccacgcggtaatcaaaagtatcctgctctgcctgtgggcctttgtcggggtagaatctgccgccgtgagtaccgggatggtgaaaaacccgaaacgcaccgtgccgctggccaccatgctgggcaccgcgatggccggtatcgtctacatcgccgcgacccaggtgattgcgggtatgtatcctgcctctcagatggccgcatccggtgcgccgtttgcagtgagcgcctccaccattctcggcggctgggctgcgccgatggtttccgccttcaccgcctttgcctgcctgacttcgctgggctcgtggatgatgctggtgggtcaggccggcgtacgtgccgccaatgacggtaacttcccgaaagtgtatggcgaactcgacagcaacggtattccgaaaaaaggcctgctgctggccgcggtgaaaatgaccgcgctgatggtgctgattaccctgatgaactctaccggcggcaaagcgtctgacctgttcggtgagctgaccggtatcgcggtactgctgaccatgctgccttacttctactcctgcgttgacctgattcgcttcgaaggcatcaatgtacgcaacttcgtcagcctgatttgctccgtactcggctgcgcgttctgcttcatcgccctgatgggggcaagctccttcgaactggccggtacctttatcgtcagcctgattatcctgatgttctacggtcgcaaaatgcaccagcgccagaacaacgacaactccgctgatagcagcaccgccagcgcgcattaatcagcaaccctattcctgaggctccttccatcacctgtcacgacgtggcgggaggggctttctttatctggagatttgactatgaacgttatcgcaatcatgaatcacatgggtgtctacttcaaagaagaacccatccgtgaactgcatcgcgccctcgaacgcctggacttccgtattgtctacccgaacgaccgtgaagacttattaaaacttatcgaaaacaatgcgcgtctgtgcggcgtgatcttcgactgggataaatataatctcgaactgtgcgaagacatcagcaaaatgaacgaatacatgccgctgtacgcctttgcgaacacttactcaacgctggacgtgagcctcaacgatctgcggatgcaggttcgcttcttcgaatatgcgctgggcgcagcggaagacattgccaacaaaatcaaacagaataccgacgagtatatcgacaccattctgccgccgctgaccaaagcgctgtttaaatacgtgcgtgaaggcaaatacaccttctgtaccccaggccatatgggcggtaccgcgttccagaaaagcccagtcggcagcatcttctacgatttctttggttccaataccatgaaatccgatatctcgatttcggtttctgaactcggttctctgctggaccacagcggcccgcacaaagaagcggaagagtacatcgcccgcgtcttcaacgcggaacgcagctacatggtgaccaacgggacctctaccgccaacaaaattgtcggcatgtattccgccccggccggtagcaccgtgctgattgaccgtaactgccataaatcgctgacccatctgatgatgatgagcgacattacgccaatctacttccgcccgacccgcaacgcctacggtatcctcggcggtatcccgcagagcgaattccagcatgcgaccatcgcgaagcgcgtgaaagaaaccccgaacgcgacctggccggtgcacgcggttatcaccaactccacctatgacggtctgctgtacaacacggactacatcaagaaaaccctggatgtgaaatccatccactttgactccgcgtgggtgccttacaccaacttctcgccgatttatgaaggcaaatgcgggatgagcggcggccgcgtcgaagggaaagtgatttacgaaacccagtccacgcacaaactgctggcggcgttctctcaggcctcgatgattcacgttaaaggcgacgtgaacgaagagacctttaacgaagcctacatgatgcacaccaccacttctccgcactacggcgtggtggcctcgacggaaaccgcggcggcgatgatgaaaggcaacgccggtaagcgcctgattgacggctctatcgaacgttcaatcaagttccgtaaagagatcaaacgtctgaaaggcgagtccgacggctggttcttcgacgtctggcagccggaacatatcgatggcgctgaatgctggccgctgcgctccgacagcgcgtggcacggcttcaaaaacatcgataacgagcacatgtatctcgacccgattaaagtcacgctgctgactccggggatgaagaaagacggcaccatggatgagttcggtattccggcgagcatcgtggcgaagtatctcgacgagcacggtatcgtggtcgaaaaaaccggtccgtacaacctgctgttcctgttcagtatcggtatcgacaaaaccaaagcgctgagcctgctgcgtgcgctgaccgatttcaaacgcgcgttcgacctgaacctgcgggtgaaaaacatgctgccgtcgctgtatcgtgaagatccggaattctacgaaaacatgcgcgttcaggaactggcgcagaacattcataaactgattgagcaccacaacctgccggatctgatgttccgcgcgttcgaagtgctgccgaccatgatgatcacgccgtacgccgcgttccagaaagagctgcacggtcagaccgaagaggtgtatctcgaagagatggtgggccgcgtcaacgccaatatgatcctgccgtatcctccgggagtgccgctggtgatgccgggtgaaatgatcaccgaagagagccgtccggtgctggagttcctgcagatgctgtgcgaaatcggcgcccactatccgggcttcgaaaccgatatccacggcgcctatcgtcaggcggatggtcgttacaccgttaaagtgctgaaagaagaaaataacaaataatcgatgcacaacagggaagtggcttgccacttccctttttcacgctgcaaggagaacacatgaaaacaccctcacagccgcgcgcgatttattacatcgttgcgatccaaatctgggaatatttcagcttttacggcatgcgtgccttactcatcctctacctcacccatcagctcggctttgatgacagccacgctatcagcctgttcagcgcttacgcttccctcgtgtacgtcactcctattctcggcggctggcttgccgaccgcctgctcggcaaccgcacggcggtgattgccggcgcgctgttaatgacgcttggccacgtggtgctgggcgtggaatccgattccacctggagcctgtacctcgcgctggcgatcattatctgcggctacggcttgttcaaatccaacatcagctgcctgctgggcgagctctacgccgttgacgaccctcgccgcgacggcggtttttcgctgctgtacgccgccggtaacgtcggctccatcgccgcgcctatcgcctgcgggctggcggcgcagtggtacggctggcatatcggctttgcgctggcgggaatcggcatgtttgtcggcctgatgattttcctcagcggtagccgctacttccgccacgcgcgcggcgtcgataaacaggcgctgcgggcggtaaagtttgtgctgccgacctggggctggctggtggtgatgctctgcgttgcgccggtgtttttcacgctgctgctggagaataactggtccggctatctgctggcgatcgtgtgcgtgttcgccgcccagatggtggcgcgcattatggtcaaatcgccggagcatcgccgcgcgctgtggcaaatcgttctgctgatgctgaccgggactctgttctgggttctggcgcagcagggcgggagttcaatcagcctgttcattgaccactttgttaaccgtcgcctgctgaatattgaggtgccgaccgcgctgttccagtcggttaacgccgtggcggtgatggcggcgggcgtcgtgctggcgtggctgatgcggccggaaggcgcgacccgctcggcgctgcgcgtgtggctgaagttcgcctttggcctggtgctgatgggctgcggctttatgctgctggcgcttaacgcgcgccacggcgcggcggaagggcaggcatcaatgggcatgatggtggccggcctggcgctgatgggctttgccgaactgtttatcgacccggtagcgatggcgcagatcacccgcctcaatatgcccggcgtcaccggggtactgaccgggatttatatgctggcgaccggcgcggtagccaactggctggcgggagtggtggcgcagcagaccaccgagtcgcagatcagcgatacggcgattgccgcgtatcagcacttctttgcccagatgggcgaatggacgctgggctgcgtggcggtgattgtcgtcgtcgccttcgccgccgcgtttagcgtcggcaaacgccgcgcggccgccggtgaacttcccggcggcggcgcctagccccgtctggcgacaggtccggcttaccggggctacaaaatcgtgctgcctggtagcccggctaaggcgtttacgccgcgagccggggatcggtaaccccaacagtggagcgacaagccgctccttgcaccgtttactgaacaggaggaggatattctggcaggcgcggaagccgaagataaaaaactgttactgaagcgatggctgagcgaaatcagccagaattgaagccaggctccttaagattgttctttggcgtcgacgccggaacaggccgcgctggagagtggcctggttcaattatcgaagcaagtttgcaagcagggttatgaggaaccaacatgtctgaacaacaagcacaaggtgccgatgaggcaattgaccttaataatgaactgaaaacccgtcgtgaaaaactggccgcgctgcgcgagcagggcgtggcgttcccgaacgattttcgccgtgaccacacttctgaccagctccatgcggaatttgatggtaaggaaaacgacgagctcacctctctgaacgtcgaggtcgccgtggctggccgcatgatgacccgccggattatggggaaagcctctttcgtcaccttacaggacgtcggcggccgcattcagctgtacgtcgcccgcgacgatctggcggaaggcgtctacaacgaacagtttaagaaatgggatcttggcgacatcatcgccgcccgcggtaagctgtttaaaacccagaccggcgaactctccattcactgcaccgagctgcgcctgctgaccaaggcattgcgcccgctgccggacaagtttcacggcctgcaggatcaggaggcgcgctatcgtcagcgctatctggatctgatctccaacgaagagtcgcgccacaccttcaaggtgcgttcgcagatcctcgccaccatgcgtcagttcatggtcgcgcgcggctttatggaagtcgagactccgatgatgcaggtgatccccggcggcgcctccgcgcgtccgtttatcacccatcacaacgcgctcgatctggatatgtatctgcgcatcgcgccggagctgtatctgaaacggctggtggtcggcggcttcgaacgggtgttcgaaatcaaccgcaacttccgtaacgaaggcatctccgtgcgccacaaccctgagttcaccatgatggaactctatatggcgtatgcggattacaaagatctgatcgaactgaccgaatctctgttccgcacgctggcgcagaccgtgctggggaaaaccgaagtcccgtacggcgaccaggtgttcgacttcggcaagccgtttgaaaaactgaccatgcgcgaagcgatcaagaaataccgtccggaaaccgagatggcggatctggataacttcgaggcggcaaaagcgctggcggaatccatcggtattcacgttgagaagagctgggggctggggcgtatcgtcaccgagattttcgacgaagtagcggaagcccatctgatccagccaacctttatcaccgagtatccggcggaggtttcgccgctggcgcgccgtaacgacgtgaacccggaaatcaccgatcgtttcgagttctttatcggcgggcgtgaaatcggcaacggctttagcgagctgaacgacgcggaagaccaggcccagcgtttccaggatcaggtcaacgccaaagcggcgggggatgatgaagcgatgttctacgacgaagactacgtcaccgcgctggaatatggcctgccgccgacggccggtctgggcatcggtatcgaccgcatggtgatgctgtttaccaacagccataccattcgcgacgtgattctgttcccggcaatgcgtccgcagaagtaaatcccgctaaaaccaggtcccctcgtttccctgaaccggggggcccttatttcgacgtgtttaattccgacgagtaataattgcgaatcagcttactccggacaccttatgtgctataacagcgcgcataaaaaacataaggtgttaattaaatgaaaaaaataaaattaattgttggtggcgtgatctgtgcaagttatttatttacgtcagtgttatcaatggcaagtgataatatcaacaaccataccgttcattttgataaaggcagcaacggcacgataataaaaagcaccgtgaccggtgacggcgttaacgactatacgctggaggcgaaagcgggccagatgatgcatatcaatatgaacagccagcggccgcatccttatttcaatgttatcgctcctgataataattcgatttttaacggttctctgagcggtgatacctttgaacaacgtctgatgagcagcggtaaatatacggtgcgggtttatcagatgggcggcgcgcgcgatgaaaggaaaaccagcgcttacgcgctgacgtttaaaattaccgactaatatttggcggctgtctattcaggctgtcccggaggcggcgcgctgcgcctgtccgggctaccggcccgcagacggtggtgaacccgtagcccggtcagcgcagcgccaccgggaaacaaagcgcagagtggctgaatttcccggaggcgatgctgcacatctgtccgggctaccggcccgcagacggcggggaacccgtagcccggtcagcgcagcgccaccggggaaacaaagcgcagagtgttgcagaacgggcctgttcccgggttaaagcccttcggtgacgatttttgccgccgcggctaacacctctttgcggcttttcgcatcctgctgcggctgggtaaaataggtcaccagcaccagcggggcatgattttccggccagatcaccgcgatatcgttggtggtgccgtaatctccggcgccggttttatccccgaccgcccagcttgcgggcaggcctgcgcgaatgctttgcccgccggtggtattgccttttagccacgtcactaactgggcgcgctgctgttcgcccagcgcattgcccagcgtcagcttgcgcaggctttcggccatcgccaacggggtggtggtatcgcgcttatcgccgggaatcgcgctgttcagcgccggctccgtacgatcgagacgaaaagtgacatccccgatactctgggcgaatgcggtcaccttttccggtccgccaaggtagctaatcatcttattcatcgcggtattgtcgctgtactgcagcgccgccgcgctgagttccgccagggtcattccgctttgcagatgtttttcggtgatcgggctccagaccactaaatccgattttttaatctccagccttttattcaccacctctggattgctttcgctctgttttaacaccgcggcggcggccatcactttaccggtgctgcacatggcaaaacgttcatcgccgcgatagagggtttgcgaatcatctgccgtgttaatcagcgctacgcccagccgaccgccggaacgtttttctaaatcagccagcttttgctggatagcatcggcactggcccataatgaaccgctcgccagcagcagcggaacggcggcggcggccatcagggcggttttacgccacgaacttttcaacatctcagactccttgatagtgatgagctgcccggactatccgcgactcccgcgcttttgacaagcactatgtcgatgatggaattccatcataaattcgttattcgtcctcctctgcgcctgcttatagtgtctctccccggcaaaataaaatcaggagccgttatgttcccgtcacagttaccaaaaccgcgccatcccgccgcctcggcgatcccctcgctgcgttgggccattattggccccggctggattgccgagcgctttgtgaaatcgttaaaagagctcagccgccagcgggtggttgccgtctcctcgcgcacgcagcaaaaagccgacgatttcgccgcccgctgggggatcccgcaggcttatgctcaggtggatgagatgctggcgcgagcggatattgatgcggtttacgttgccacgccgcataaccaccactttcccgacgggctgcgggtgctgcaggcgggcaaacatgtgctgattgaaaagccgtttgcgctgaaccggcgggaaggcgcggcgctgaaagcggaggccatgaagcaggggaccctggcgatggaggcgatgtggtgcgactacgcgccgaagtatgacgtgattcgccagctgctggaggacggcgtgctgggcgatctgcacacgctgctcgccgatcacggcgagttttttaccccggatcatcgcatttttaatgccgatctcgccggcgggccgatgatggatctcggcagctatctgacctcattctgcgtgatggtcggcggcgtgccgcaggacattatcgcccgcgggcgtcccgcccaaagaggcgtcaacgggcagatttcgatgctgtttaactgggaaaacggcttacagggattgctcaataccaccctgttcagcaacacgccgggcggcgcggtggtggccgggcgcgatgcgacccttaccctcgacgggcagttctacgcgccggggaattttaccctcgccgccagccagggcgggcaggtgctgcgctgggaggagccgcgcaaccgctacgaccagctgttttatcaggccgaacattttgcctggtgcgtggggcaagggcttacggactcgccgatccgcccgctggccagggtgctggaaaacctgagcgtgatggacgaagtgcggcggcagattggcgtgatatttaacgaggagcgttaacggcgcgccgttgccccgtatgccgaccgcatacggggcttttttacgccagcggttcgacgctgacaaactgcccttgccgcagggaaagcacggcggcttcggcgatagcctgcgcccgcagcccgtccagcagccccggcaggtccggcaccgcttctccgcctagcgagcggacaaaagcatccagatgcgcgtagtacgacccctcgacgcgactgaaccagtccggatagaggccgggctgaatgcagcgcgctccctgccacagcgtgacgccgcgcgatgcctggctgccggactctatcactccctgcgggccaagcaggctaatgcgctcatcgtagccgtggccggtgcgccgggtgttgtccagctgcgccagcgcgccgccgcgcatccgcagcatgacaatggaggtatcgacatcgtcgaattcggcaatttccgccagcgccagcgcagcccccagcgcggcgacggtcgtcacttcatcaccggtaagaaagcgcagcaggtcaaagaagtgaatcgcctggtcgcgcatctggccgcctgagctgcgcagatattccagcggcggcataaccgatgcccgacacaccatctgaaccagttcgattttgccaatcgcgcccgcctcgatctcccggcgcagctgctggtggctggcgtcgaagcggcggttaaagccaacggtcaccggtaccccgagcggcagcactttctcgacgacctggcgggcgcgggccagcgaaagatcgatcggtttttcgcagtagaccgcttttcccgcgcgcgcggcggcttccagcagcgccgcgtgtgaaggcgtcgagctggcgatcagtaccgcgtcaatggcgtcgctattgatggcttcggcaacggttaccgcccgcgcgccgtagcgggaagccagcgctttcgcccgctcgggatcggcgtcggccaccatggccagaagggttcgctcatggcgagctaggctggcggcgtgaacctggccaataaaaccgctgcccaacaatgcaaaacgaatgcaggtcatttttttctccagaaagagggatttagcgttgccaaagtaatccgtttgctacactgaccgacacgggcgttttgatggatttccatcatgggggagacgagacgatgaaaagcatttcgctggaggcgctggctaaacggattggcgtgggcgtcgcgaccgttgaccgggtgcttaacgaacgcggcggcgtgtcgccggaaaccacgcgcagggtgctgcaggccgcgcgggaggccgggctgaagcgcattctgccggaagagcgccgtctcccgtggcaaatagaagtgtttctcagcgataacgattcgcgctttttctcccgtctgacgcaggatttcgccgacgtggcggatagccttggctatcgccggctgacgctgcaccgcacgctggtggcggagtccgcgccggaaaagctggcgaaaagccttatccgcagcagcaaaaagcgccatgcgataattgtctttggcaacgaacatccgcgggtctatgacgccttgcgccagtgtcgcgaggcgaacgtgccggtgattacgctggtcaccgatctccccggcgcgcagaggctttgccacgtcgggatcgatcagcagcaggccggccgcaccgcgggcatgatgatggggttaatggcgcaccggtctggagaagtgctgatgctcagcgggcgccaggacttcagcgctcatcgcttgcggattcagggatttcgcgaggtgattagccagcgctttccgcatctgctgctgggcgaggttttggcgggggaggacaaccgacagcgaatcgaccgcctgctggaagaggccctgcgccgcaaccgcgacgtggtgggcatctacaataccgggctgggcaacacgcaggtggcgcaggcgctggctcgccatcgccgctacggcgagtgctgctggatgacccatgaacgctacagcaccacccgtgaacagctggcccaggggggaatggcgctgacgatcgatcaaaacccgcgccagcatgcccgtctggcggtggagctggccctgcgccatctggaaaccggctatcagccgcatctgttcagcgacggcaaggtcgaatttatcctttacagcgctgaaaacgtcgactgagcgcccgcggcccgcggggcgacatccccttttacaccctatctcctgtctcgttttaaaccgctgccgctatcggcgcgccgcgcggcaaaccgtcgcctgcctctcattttttgcgcatttatgcgtcaatgttagatgtgtgtcaaagttctgttaacacgcagttttaaaattttcatttcagttatttacttataaaagtttcatatgtgttgttaatgaaataaacggtctggaatttttcttcctctataaatggactaatgtttcaaaaaaccattttaaaacaactgaattttgtgatttcgatcaacaacaaaaaatgcaccagcgcgcgggctgttttttcaaaaagctggaaaagcaggcgcttaacgcacaattaatgaaactattttttcattttaccttacctaaccgatgtacctgaaaataaaggatcaacgatgaatattaagaaaacggttgttgcctctttgatagcctgcatgctgccagcggtcgtgatggcgaaagatatttcggtcggtgtttccatggcgctattcgatgacaacttcctgacgattctgcgcaccgcaatgcaaaaagagatgcaaaaagatggcgttaaggcgcaggtggaagatgccaaaggcgacgtctcccagcagctacagcaggtacagaactttattggccagggcgtcgacgcgattatcgtcaacccggtcgacaccaacgcggtcaaaccgattatggaccaggcgaccaaagcgggcattccgctgatctttgttaaccgccgcccgcaggcgcagctgaccgacaaaatggcctacgttggctccgactcggtgctggcggggcgcttacagatggaagcgttagccaaagcgatgaacggcaaagggaacgtcgccattctgctcggcgacctggcgaatgaatcgacccgtgaccgcaccaaaggcgtcgaagaggtggtggcgaagtacccggatatcaaaatcgtgcagaagcagaccgcgaaatttacccgcaacgatgccgttgacgtggtcagcaactggatgaccagcggcgaagacattcaggccatcgcctccaacaacgatgaaatggccatcggcgcgctgcaggcactgggtaaaaacccgaaccatatcctgatagccggggtggacgggacgcccgatgccctgcaaatgctcaaaaacggcaagatgatcgccacgattttccaggatgccaaagggcagggcgaaggcgcggtggatgccgccattaagctggccaacggcgagaaagtggaaaagatcatcgacgtcccttaccagctgatcaccaaagacaacatggctgagttcgttaatcgcaaccagaaatagtcgctcagggtacggaggtgaagtatgaacgcttttgcacttgaagccgaagggatcagcaaattcttccccggcgtgaaggcgctcgacaacgtctcattacgcgtgcgcccggggacggtgcacgcgctgatgggcgaaaacggcgccggaaaatccacgctgatgaaatgcctgatcgggatctaccgtcccgataagggcgcgatccgcgttaaaggggagccggtccagtttcaggatacgatggacgcgctgcgcgccgggatctcgatgatccaccaggagctgaatctggtgccgcatatgacggtggcggaaaatatctggctcggccgcgagccgatgaaatacggttttgtcgatcatcgccagcttgcccgccagacgcaggatctgctggataaactcaatatccggctatccgccgaccggctggtgggggagttaagtatcgcctcccagcagatggtggaaattgccaaagcggtttcgtggaacgcggatattgtgattatggatgagccgacctcggcgttaaccgaaagcgaagtggcgcatctgtttaccattattcgcgatttacgccagcagggaaaagccattatttatatcagccataaaatggatgagattttcgcgattaccgatgagatcagcgtatttcgcgatggcacctgggtcggcagtaaacataccaccgagtttacccgtcagtcgctgatcacccagatggtcggccgggagctcacccagctctttcccaagttcaataacgccattggcgaagaggtgctgaccgtccgcaatctgtcgcgcaagggggtctttcacgatatcaactttagcgtacgccgcggcgaaatcctcggcgtggcggggctggtgggggccgggcgtagcgaagtgatggagagcctgttcggcatggataaagccgatagcggcgaagtgctgattgagggagtaccggtcacgattgactcgccttcgacggcgattgaaaaagggatggcgctgctgacggaagaccgcaaaaagtccggactgtttctcgtgctgtcggtgctggagaatatgagcatcgtcaaaatgccggaatatatcggtaaaaccggctttgttcagcacctcaaaatggccgaagactgcatggagcagatccgccgcctgaatattaaaacccccaccatggatcagattattaataacctcagcggcggtaatcagcagaaggtactgattgcccgctggctgctggcccagccgaaaatactgattctcgatgagccgacgcgcggaatcgacgtcggggcgaaagcggaaatttaccatctgatcagcgagctggccaaccgcggcgtggcggtgattatggtctcttcagaattgccggagattctcgggatgagcgatcgggtgatggtcatgcatgaagggcgtattaccggcatcctcaataaagaggacgccgaccaggaaaccattttgtcgttggcatcccattgaggcacagagaatgagcaatatgaaaataacggcgaccccgatcactgagaaaccctctttctttgggcaattacgccaccggctgccgaaagataccgggatatttatcgtcatgctggtgattgccctgacgtttgaaattgccggctggtacgtccgcgaccagtcctttttattaaacaccaatcgcctgatattaattgttttgcaggtagcgattatcggtattatcgccgtcggggtcacccaggtcattattaccaccggcattgacctctcctccggctcggtgatcgctctcgccgccgtggtggcggcaagcctcgcgcaaacctccgatagcctgtcgccgatgttcccgtcgctggtcaatatgccggcgattatcccgattggcgccggcatcggcgtcggtcttctgtgcggcttaaccaacggctttctggtgacccgcaccggcatcccgccgtttatcgcgacgcttggaatgatggtgtcggcgcgcggtctggcgcagtactacactcagggcaacccaatcagcttcttatccgacagctttaccgccatcggccagggggcgatgccggtgattattttcttcgtcgtcgccgcggtcttccatatcgccctgaagcatacccgctacggtaaatacgtttacgctatcggcggtaacatgacgtcggccaaggtctccggtatcaacgtgaataaatacctggtgatcgtctatgccatcgccggggcgctctccggcctggcgggcgtggtgctggcggcgcgcgtcagcagcgggcagtcgagcatgggcatgtcctacgaactggatgctatcgccgcggcggttatcggcggcagcagcctgatgggcggggtggggcgcatcaccgggaccttaatcggcgcgatgatcctcggcctgattaaaagcgggtttacctttgtcggcgtcgacgcctacgtgcaggatattatcaaaggcatcattatcgtcgcggcggtgactatagatatgcgccgcaaccgcaaaaagcattgattttttatggcctgcagccgctatcgccgtaggccataaattattttaaataagaatttacttaatccagttcacacttttgttcggtcgccattgtcattacgcaggggcgcttagataatccgccgaaataacccatttttatgatggcgtgctactgcgaaagcaggcaagaccaaaatagaaatgctctcccgccaaggggagcgtctctgttttggtctttttttttgccccaacaccagggaacactatgaactataacgaaacagcagacaaaatcctccacgcggtgggcggtgcggagaacatccgtatgctcacccattgcgcgacccggctgcgcatggagttcaacgaccgcgcaaaggttaacgatgcgcagattggcgcccttcccggcgtgatcagcgtagtggagaagggcggccagttccagatagttatcggcaatgaggtgcagcaggtttaccgacggctcaataaggcgctgccggagaaaaaaggcccggcaggcggcgataaaaacgcgaagccggccggcatcgtcgcccggattatcagcgttatttcgaccacctttaccccggtgatcccggcgattaccggcgcggggatgattaaagcgctgctggccattctcaagctcacgggggtgattagcgaaaccagctcgacgtatcagctgctgaatattattgccgacgccgccttcttcttcctgccggtgctgctggcctacggcgcatcgctgaagtttgaatgcaacccgattctggcgatgaccctcgcgggcgtgctgctgcatccgggcatcggccagatgctggcggccggtaaagcggtggattttgtcggcatcaacgtcctgctttccgattacgccggttcggtgctgccgattattctgaccgtgtggctgatgtcgtgggtggagcgcttcgccgaaaaagtgtcgccatcgattatcaagtttttcgttaagccgatgctgattctgctgattaccgcgccgctggcgctggtggtggtcggcccggcgggcattttgcttaacgatctggtcgccgccggggcgggcgctatcgaccgccacgccagctggttaatcccgatgctgatgggcaccctgcagcccttcctgatcattaccggcaccgcctgggcgatgacgccgatcgccaccggtcagctgagtaaaagcggttacgagatgattaacggcccggggatgctggcctcaaacgtggcaatgggagcggcgacgctgtgcgtggcgctgaaaaccaaaaatagcaacctgcgccagctggcctcttcgtcgggctttaccgcgctgctggggatcaccgaaccggcgctgtacggggtgctgctcaagttccgccgggtgctgattgccgcgatgatcggcggcggctgcgccggggtctacgccggggtgagcgggctggtgcgctacgcgtttgtctcgccaggcctcgcggcgctgccggcgtttatcggcgaaaacccgatgaacatcgtccatgcgctggtgacctgcgcgatttccatcgtggtgacctttaccctgacctggtttatcgcttttaaagacgttcctgaggaacaagacgcggtgagcgagacgccgcagcctgcggtcagcccgacaagcgagggggggaccgaagtcttcagcccgctgcgcggccaggtggtggcgctcagcgacgtgaacgacgacgtcttttccggcggcctgctgggcgaggggctggcgattcgtcccgaagaaggggtactgcgcgcgccgtttagcggcacggtaatgatgtttctgccctcctgccacgccgttggcctgcagagcgacagcggtgttgagctgctgatccatatcggtattgataccgttaatcttaacggccagcactttagctcatcgctgaaggtgggggatagggtggaggcggggcaggttctgatccgctttgatattcccgccatcaaacaggccggatacgacctgattaccccggtgattgtggtcaacggcgatgggcagcacgctctgcgcctcaccgccgccgcgcaggtggattacggcgaacccctgatggtgcaatccgttaaggaggcgcagccatgatttatcaacagcaggcccggttcccggacggttttctgtggggcgcgtccacctcagcctatcaggttgagggggcgtggaatgaagacggtaaaggaccgtcggtagtcgacatgcttagccatccgccgggaacggcggacttccgcatcgccagcgaccactatcatcacgtggaggaggacgtcgcgctgatggcgcagatggggctgaaggcctaccgtttttcggtggcctggtcgcgggtgatacctgacggcgatggcccggtgaatccggatgggctggccttttatcaccgcctgatcgacgccctgacgcgccacgggatcacccccatcgtgacgctctaccacttcgacctgccgtgggcgctggagctaaaaggcggctggctgaaccgcaaaaccggggaggcattcgtgcgctatgccaggctgctgttcagcgaatttgccgccaaagttccgctctggctgaccatcaacgaacagaacaccatgattctgcatcccggcgcgattggcgtgcccgccgatcgtgaactgccggataagaaggcgctgtaccagcagaatcatcatatgatgctggcccaggcgcagatcttcgccctgtgccaccgtgagttccccgggctgcgcatcggcccggcgataaacaccacgtcgatgtacgccgaaagctgtaagccggaggacgccatcgccgcgcataactgggagacgctgcgctgctggagctttttggatgttgcggtgcatgggcgctacaacgccctggcgtgggcctatatgcaggatcgcggccttgcgccggaggtgcagccggaagatgcgctgattttgcagcaggggaggccggactttatcgccattaactactactcgaccgccaccattgccgccagccggggcgacggcggcgacgttgcgccccgcgcgggcgatcagcaaattatgctgggcgaagagggggtttatcgtccggcggaaaatccgtgggttggcaaaaccccttacggctgggttgttgacccggtggggctgcgcctgacgctgcgtaaagtgtgcgagcgctacggtctgccgattctgattagcgaaaacgggatgggcgcgccggacaagctggagcatgacgggacggtaaatgacgactatcgcatcgccttcctcgacgcgcatatcgcacagatgcggctggcgattgccgacggcgtcgagctgatgggctactgcccgtgggcggcgattgacgtggtcagcactcaccagggatacgccaagcgctacggttttatttatgtcgatcgcggcgaggatgacctgaagcgcctgcaaaggatccgcaaacgcagcttctggtggtataaggatgtcatcgcgcagaacggcaaccacgacgagtcgcagagatgattgttcagaaggtgctcaataatagcctcgtgctctctatggacgacgataacagggaggttatcgtcatggggaaaggcattggtttcaatagcagacccggggacgagatcgccccggagaagatagagaagctgttcgtgacccagacgctcggcgcgcgcagcggctatcttgaggcgctctccgccattccggatgaggtcatcgaaatggcggcgatgattatttcccgcgccaatctgcagctcgccggcaaggttcgcgagcagattttctttaccctcgccgaccacctgacctttgccatcgagcgcagccgtaaagggatcgccattcaaaatcgcctgctgccggaagtcaggcgtttttatccgcagcagttccgcgtcgccagcgaggcggtgacgattattcgccagcagtacgggatcgaactgccggaggaggaagccgggaatatcgcctttcatctggtaaacggccagagcgagggcgacgacgtggcgcagaccatgcagtcggtgaaaatgctgaaggatatttttaatctcgtgcagtaccactttaagcagcagatagacaccgaatcgataaactactcgcgctttttggtccatatgcagtttttcctccagcgtttacaggagggggagctggacggcgcgcgggacagttttctgctggtgcaggtgattaaggcgtatccggacgcataccgctgcgcgctgctaatccgcgattacgtcaaagcccagctcgatatcaccctcggcggcaacgagctgctgtggctcaccgttcatctggtgcggatcgcgggactggatgcgtgattgtgttcttttaatggggcgtaatagctatttctgttttttttatgggacatgagctctttggaatgactgagttggctcatttgtagtgttctataaacaggttataatcgctaactacgttctattaataagacaagagaagcattatggcaaagccgtcaacccgaacctactctcgttacagtcgcgatgcagcacggttgctgggaatgatgatccgcaccgcacgcatagaatccagactcactatcgaggagctggcagaacgtgctggcgtgtcgcgtgggctggtttatcgtgctgaggaaggcgatatgggatgtgcgattggcgcggtatttgaactggcgacaatagtgggcgtgccgctgtttacgccagatcgttctgctctggcgttacatattgctaatgcagagaaaacgctgtcattaatgccgcgtgcggttcatcactcaaggaaggtgataaatgatgacttctgagaatagccttgagcaagtgtatgtctggatctggctgcctggagcaacagaacccgttgtcgccggagtgttaagcagagacaacggtcggtttattttcaactacggccgcagttatctggagcggaaagaggcgatagcggtttatgtgccggagcttcctttagtcagaggcgcaattgtacctgcccctggtttgcaaatggctggcgcgttacgcgatggagctcctgatgcctgggggcggcgagttattctgaaccgactgatgggcgcacaaggcagagagaccgatcccaacaccctggatgaaatgacctacttacttgagtccggttccgatcggattggtggtcttgattttcagcgctctgcgacggagtacgttccacgcgcggcccgaggagcatcgcttgaagagcttatgcaggcagcgtcgatggtggaaaacggtataccgttaaccgtcgatcttgaacaggcgttatttcacggcacttcactcggtggagcacgaccaaaagcgatgatcgaatttgggaatcgtaaatttatcgctaaattttcttcttcaacagatacctataatgttgttaaaggcgaatatatcgccatgcgcctggcaggctgcgttggattgaatgttgcgcctgttctctttcgccatactgctggtaaagatgttttgcttatcgagcgttttgatcgcgtccaaagcaagaccggttggcaacgccgcctgatggtgtcagcgctgactatctttggtcttgatgaaatgatggcaagatatgcgagctatgaagatttggcggacattatacgtcagcgttttagtgcccctaaagagacgctgcgggagctgtttgggcggcttgtttttaacattatttgtggtaataccgacgatcatgccagaaaccatgcggcattttgggatggtaaaaggcttagcctgacgcctgcatatgacatttgtcctcaagggagagccggcaatgaagccacgcaggctatgctgatcgtaggcgaaaatcggatgagtaaccttgcggtttgcctgtcggctgccgaccgttttttactgagcagacgtgaagccattgagcttattgcccattatctcgatacggtccatatgaactggaaagccctcggcgatgaggtggggttaagtgaagtggacagaaaactcttctggggaaggatgtttttaaatcctttcatatttgaaggcgcgccagaagagattttgagactacgtaagtcgtggctttaatgcgtccggtgccactgcattttcaacgcggcaagacaaatagtccgttaacgcgtttcgataaccttttaaacctccgtagtatcaccgatgccgaaactgcagcgtcgccggcaggtagcgctgtagcggttcaggcgtgttgccctcgatcaactgactgattaaatcgtagcagtgccaggccagctggcggttgtcctgctgtacggtatcaatacgcagcgacagcgaatcgtagagatagtgatcgtcaaaacttgccaggtggatgtctgaatccagcaaatggtgctggctcatatagcgcagcaccccttccagcagaccacaggcggcggtaaacagcgcctttggcggccggcccaggcgcgcgcagagggcggcgaacatctcatagccggagctggggtgatagttgccgttgatcacccactccgggcgcagcgcaatgcccgcctgagtcagaccctgcgtaaacccggccaggcgatcgcgggagggcgacagacgcggctggccgcctaaaaaccagaactcatcgtgatgctgaggcgcgatgcgggaaatcagctccgccgtcggggtaatcgaatcggtcatcaccagcggcagcgcgctttcagtaggacagcggtcaaacagcaccaccggcagctgttcgctgagcttcaggtagtcggcatcgctgtgcatacaggaggcgacgatcagaccgtcgacctggcgggcaatcatgttattgaccaccatgctctcctgaccggggttttcatcggtacaggagatcagcagctggacgcccgcttcgcggcacagcatctccagctcatgggaaaagaccgcaaagccgtagttggtgatctccggcaccaccaggccgatggtgtggctgcggttatcgcgcagcgagcgggcgtgaatgctcggctgatagtgctgctcgcgggcaatcgccagcacgcgctcgcgcgtttcctgcgccacgcgcagctccttgccacgaccgttcagcaccaggctggcggtcgctttggaaacgcccgccagttcggcgatatctttaatggttacgcgtttggttttcattacgacgccatgagcctgaaagcaaaacgcttattctatcatgcatgttcgcagcggccagtagcagaatgcatccggcgcgctgccggagaaaatcagctgcgccggataatcggggaagcagcggctgctcatcaccccctcgccgtcgttgatgaaaatctccacgctcgaccgatcgatgaaaatccgcagcgagcgcacctcgccgcgccagtagcgatagtgcatttcgtcgctggcgaggctgcgtcgcgccagacggataccgctggcgtcgcgctccagggttaacgcgccgccgaaatcaaggcttagcgcgtcgtcgccggcggtttgcagggcgatttccatcggcgccagcggcagtgcgttcccctgccagccgtgtgcctccccgcgcagggcggtcagctcgcgcagcggacgctggtagagccggccgtcgataaattccagctcgcgcaggcaggtcatctggtggatccagccgctggcaagcgtcggctgaagcatctcttcaccgtccgggacgcccatccagccgaccagcaggcggcggccatcgctggtgtgcatggtttgcggggcataaaactcaaacccggcgtccagttcgtgcagctcgccgtgtttgaacgcggcgcggtcgtagtcgacatcgccgctcatccataccgccggataggtattgaggaagcgctcgtcttcgcgggcaatcccctgcgggcagcagatcagaatatgctggtcgccgagcggaaacagatccggacactcccacatatagccagcgtcgtcgaggccattgaggccgtagccggcgatttcgcccttgctgcgccactgatgaaggtccggggagctgaacagcagcaccttaccgcgcttttgccgatcctgcgctcccagtaccatgtaccagcggtctttatgccgccagaccttcgggtcgcgcacgtggccggtatagccctccggcagcggcaggaccggaccgattttgcggaaggtaccgtcggcgttttccgtcgccaggcactgccacgcggttcggccgccgtcgtcaaacttcacgttgccggtatagcacagggtgagcgtaccgttgttatccaccgcgctgccggagtagcagccgttgcggtcgtactcttcatccggcattagcgcaataggctcatgccgccagcgcagcagatcctctgaactccagtgcgcccagcacttgaacttatgatcgcaggcaagcgggttccactggtagaacagatgatagcgcccggcaaactcgacaaagccgttggggtcgttcatcagcccggtcaccggcgcatggtgccagcgcggataatggctatcggccagcgcgcgcggctggccctgcataacggcctgcaaaatcgcaggcagacgtgatggtagtgacattattcagcgtccgttttgtatttcagcagcagagagacgacgaaagcgacgccaaaggcgatgaccatgccgataatgtagttcagcagcgagctggcctgcacgatggccatgccgggaatcgccgtcaggccgactgcggtcatatagacgtgcactgacacgacccacgcgccgcccgccgcgccgccgatcagcgccgcgataaacggcttcatgaagcgtaagttgataccaaaaatcgccgcctcggtgatgcccagcatagcggaaaacgccgagggcagcgcaatggctttgattttgacgtctttggttttaaaccataccgccaggcaggcgccgccctgggcgacgttggccatggaccagatcggcagcaggaagttgaccccgatggacgggttgcccagcagtccggcttcgatggcgtggaagctgtggtgaataccggtaatgacgataaccgaatagagaccgccaaacagcagcccggccagccagccggcgtggctaatcagggtgctgaggacaaacgaaatgccgtcgccgagcgcgcgaccagccgggccgataatcagcagggcgataaaaccggaaataatcaccgtcaggaacggcgtcaggatcaggtccagggcatcggggatcgtgcggcgcagctgcttctcaacgatgctcataaaccacaccgccagcagaaccgggaacaccgtcccctgatagccgatcatggcgatttcgaggccgaagaagttcatggtatggaaaccggcggccacgccccaggcgttagtcagcgccgggtgggtcagaatgccgccgagcgtcgcgccgagataggggttaccgccgaattcgcgggcagcggtaaagccaatcaggatcggcagaatgataaacgccgccgaactgcacatatccagcatgatgtagagggcgttgctcggatcaacccagccgtaggttttgaccatccccagcaggcccatcagcaggccggaggcgacgatagccgggataatcggtacgaagatgttcgacagcaggcgcgcgatgcgctggaaaggattaagctttttcgccgcgatgtcggcggcctccgatttgctggattcgctaatacctgccgcctgaataaaggcggcatagactttattcaccaccccggtgccgaaaataatctgcatctgcccggcattgcggaaacagcccttaaccccttcaattttgccgatagcctgctggtcggccagcgcgtcatcgaccagcaccaggcgcaggcgcgtggcgcagtgcgcggcgctggcgatattttccttgcctcccagaagcggaagcagcgagcgggaaatctgttcaaaatccatagtaccctctgaatgcgtaaaaaaattcgtgttgtcgtcccgcgctaacgggggcgcagtctctgcgtcgttattgtgtccggggcgatgaaaggcgcgtcgtcgccccggaggggcctgtcgtcaggcattcaccgtcagaaccaggtttccatctgcataccgaacgaccattcgccgcccgaggtaaaaccattgctgcccagcgcgtcatcgctggcgtaattattcagttttttgctccagtccatccacgaggtgtaaaggcggatttcagggcggctgaagaaatcaccgatgctgccgaccttaaatgtcggggcgaaggtgagcttgtagaagctaccgtttaccgcatgacgatcgttataaccttcgggtttgagatccatatactggtagctgccttcgtaagcgagagcgaagttctggttgatctcctggatcaggcgcatgttgagcgtggcccactgatagctgtcgccatcggcataacggcctttactgctttgcgccaggatcgccggggcgatagaccagttttcgctgagcggggtggtgccatagctggcgaagcgccaggtgttggctcccgaccgtagcgcgccgtcagagccgatacctttaacttccgcgcccaggccgtgaccgtagagcagggcggttttgctggtgccttcacgcagaccgtaaaaactgtcgttgtgcaggccgagcagcgtatgtaccccggtatttgccgcatcgcctttgaccgggttaccgttggtatcctgacggtcgtcgttgtcttttgcccgcatcccgctgaccatcacctgcaccggaccgatgaagttgtttatgctgaggatatagttctgcacgctgttgctcgagtcagcaatatcgccgaaattgcgcccgtaaagcgagaggttgctgcggatgctgtcgttccacctgacgtcgtaaataccgccgccggtaccggcgaggaacacaacgtcagagtcaatccagtgaatatcaaagttgtcgcggtcgaagcgtttcccggcccacagggtggagcctttaaacgcccctgtgaaggtgggcaagttgcccagttcgacaaaggcctgacgaacgttcaaatcgctgctgcttgccgtccagtcgttataagtggtttgtccgtcggcgaccatcactttgaaacgggtcgtcgcgccattatccagggtctgcttgtgttcaaggttcatttcaacataggtatccgcctggtttcccagacgaccgatagccccgccggtttcccccgctggcgtcatgtaggcgccggatttggtgctggcggcggaatcattcattatcacgccggagcgggcgtagccgtgaaactcaaagccgcttttctcatcggccttcttctcgagtttggcggtacgttgaaccacttcctgcgtcgtgtcctgatttttctgctgctgcgcggtgagctgctggacctgtttctctgccgactcggcgcggttttccgcagtctgtgcccggttttccgcctcctgcaggcgtttttccagggcgatcaaacgggcttcgatcgtgctgagatccgtttgcgcgtgggctgaggcggcgccggttagcaaagcgataaggacggcgagtgtgctttttttatacatgctggttgcatcccgaaaggaaaatgtaaaatgttgttttttgctaaaccggtttaggcgctatgttaaacacgacccttaacattttgaaatggattttgctaaaccggtttaataaatgtgatggatgcaacaaagtgggccgcgcgcggcggcctgaaggatcaaaactggcgattaagatcgcgctggtatggcagggcggtcatggcgcctttcgccgttgtcgccagggcgccgcaggtttgcgccagcgtgagcgtcggttccagcgcagcgatatccgtcggcatcccgttggcagcaaggcttgcgagcagtccggcgacaaatgcgtcacccgcgccggtggtgtccacgctgacaacgggcttggcgctgaaatgggtaaactgctgctgaaaggcggcaagtacgccggctttgccctgggtcaccagcagcagttcaggctgatagcgttcggtcacgctggcgattccgtaggctaaatcatcactgccgctgatgaataccagctcctcttccgacagcttcaccacgttggccaagcgcagggcgcgatcgaggcaggcgtgcagcagctcctgatcctgccagaggtccgggcggatattggggtcaaagctgacccggccgccggcatgtttgatgctttccatcgccgagaaggtggtgctgcggctgggctcggcgctgagcgcgatggagcagacgtgcagccactggttggcggtaaactgcggcaggtcttcttccgccaggaacaggtccgcgctggggcgcaccataaaggtaaaggtacgttccccctgatcgtccaggtcgaccaccacggttgaggtacggtgctggccgtcgaggcgcatatggctgacgtcgacctgctcttgttgcagggtatggcgcataaagcggccaaacggatcgtcgccgacgcggccgataaatccgctgtcgccgccaaggcgggcgataccgaccgccacgttagccggggcgccgccggggcagcgcagcaggcggccttcgctctccggcagcaggtccactactgcgtctcccagaacccaaacttttgcattcatgttgaaaattctccatagctaaacttaattaaaccggtttagcacattaaagcatagcgacagaatgaggggaacgtcacgggcggaaaagtgccaatcagggcataaaaacgtgagctggttagcaaaagagtgatgattcggcctggcgggaggggcttccggtggcggcgggcgagatggcggcataacgcggtaggccggagaggcgcagcgcgccgcctccggcaaagccccggagagaggggacttcagggcttgatgtgaaacgccgcagccgcttaagcccccgccgccagaccgtcgataatcacctgcatcaccccctgagaacagggctcgatgcgcccgcgcacgccgtaaaccgccgccagagcctgcggggtaatcacctcggccggcgcgccgtcccccagcagttgtccctctttcaacatcagcacgtgatctgcgtggcgcagggcgatattgatgtcgtgaaccaccaccagcgtgatgatgttgcgcctctgcgtctcctcacgcaccagatccatcacgtggaactgatagtttaaatccagcgcgctaaggggctcatccagcagcagcaggactggctgacggataagcgattgcgccaggccgacgagctgcttctgcccgccggatagccggtcgaggtagctcagcgccagatgttcaatgcctagctggcgcagcagcgacatcacctgcgcctgattttccgggctgtgcgctcctccggcggcgcgttgagcgacaataatcgactccagcacccgcaagtgcacgccggcgggcagcgtctgcggcaggtagaccactttttccgcacgccgggcaaaggggagggcaagcagattctcaccgtccagcgacagctcgcccgcggacggccccagcccggccatcgcccgcatcagggtggattttccgctgccgttggggccgagcagcgcggtgattttaccgcgctgcagccgcggtaccgtcaggtcacggatcacctgacgtctgggataaccggcgctgaaatgggtcagcgccagtccggatacaacatggctcatacgtgtccccgatggcgcaaaatgatgctcaggaaaaaaggcacccccaccagcgaggtgacgatacccaccggaatcactgcgccgggaatcaggttttttgccgcaaccgaagccagcgacaggacgagggcgccgattaacgcgctggccggcaggtaaaagcggtgatcttcgccgaaaaccagcctggcgatatgcggcgccaccaggccgataaaaccgattgggccaacgaacgccaccgaaatcgccgacagaacgctgatgcgcagcagggtggtcaggcgcaggcggcgcacgttgatgccgaagctgacggcccggtcctcgccgaggcgcagcgcggtcagcttccacgcgctgcgcattgatagcggcatgacgaccgccagtatcgcaagcaggatccccaccttttgccatgaggcgcggtcaatgctgcccatcgtccagaacaccagtccctggagggtatcttcgttggcgacaaactgcagcatcgataccagcgcattgaaggtgaacaccagcgcgatcccgaacagaatgacgccggaggtggcgacctgggtccagcgcgtaatgccgtccagcagcagcgccgccagcagggcgaagataaaagcgttggccgagacaaaccactggccgggaaccccgggaattcctatccccagcacgatagccagcgccgcgccgaatgccgccgccgaggagacgccgagcgtaaacgggctcgccagcggattgttaaggatggtctgcatttccgccccggcgaggccgagagccaggccgacgacgatcgccatcagcgcatagggcatgcggatatcccagacgatcgcccgcgtcccggcgctggcgctggccgggtcggtaagggtttgccaaagcgcctgcagcgacaggccggatggccccatcacgaagtcgagcagcagcgaggcgacaatcaacagcgtcagcagcagcagcatgatggcgcggcggcgcacaatgtgacggtagtttgccattacgtcacggctatcgacgccgaacgcgacgatatcggattcaggagagagactcatggctaattactcaccttgttgccaggaaaaaacaaacggcagatcgggcagggtggtgaaatgacggacaatgtagtgccagctatcgtcagggttgaggtcgctgaaggtctggggatagatatccttcgccagatacgccataccgacgatattccacggatggttgtagaagtggtggtaaatgccgtaagcgcgttttgcttcaatcgtcgggatgttgctcacgccggtgcgcgatagcagccgctccgcctggcgattgacctcctgaggatcggcctgtaaaccgagcggcagcacctggctattcccgcgttttgaaccggtcataatataggcatccggcttcatgctaatcactttttccagcgacacaaagccggaagcgcccggcagcagctgcgagccgatattgttcgcgccgacggcttcgaccagaccgccccagccgttgtggccgtgggtaaagcagcaggcatcgctattacccgccagcgcctcgacaaaaacgttagccttcggcgtgatgttcgcggttttctggcggatggcgtccagctgctgacggtaatagtcggtataggctttggcgttttcttcacggttaaggactttccccagcagatcgatactcggggcggtgtctttgccggggttgatttcataatcgacgaacagcacgggaatattcagcgcgctgagcttgctgatgacaccgctctcctccagcgcgggcttcgcgcgaagctgggcgatcatcaggtccggctggcgggaaatgacgctctcaaggtcaacgttgcccttatcgctaaagcccatatcgaggatctgagcggattgcggccacttctcttgcagcattttccaggtattgatgtcctgttttctggccaggttattccatgccacgacgcgcctgaaggggttgtcgcggtcgagcagagccatggccataatatcgcgaccatcctgcaggataatgcgctgtggctcatgctggagcgtaatcgcgcggccgtcgagatcggtgacggtgagcggatattgcgcggcaaagctacagagaggagtggaaatcagggcagtaaggatgaacgaacctactgattttcttgccataatatgcgttccgtttgctaatttataaatataatgattctgagaattattctcgtgtaaacataaacggcaagtatatcaacggcaaatgacttaaaatgtaacaaatttgttggaatttattcgcgcaatcagaagcgggacgcggcagaccaaaagtcgatagaaaagtccgaaatcagttttaagaacaatccctaaagccagacggtaaaatcttgtgccatgctaaatgcgactcataacattaagttcgttagcgagagaggacattatgaaaaaagcaatgattgcgttatctgcgattctggtagcagctcctgtttttgctgcaacaacgacacacgcaaccgacgataccgtcgcggcggcccatgaaggggcgaacaccgcgaaagaaaaactgcacgaggcccagcaccagggtgaagagcagcagctgaaagccaaacacgcggcagaaggcaaaagcgacagcgtaggcagcgaagtcagcgaaggcgcgcagaaaacctggaataagaccaaagaagggactgagaagggctggaacgcgactaaagaaggcaccgaaaaaggctggaataagaccaaagaggtcagcaaagaaggctgggataaaaccaagcagggtgccgaagagctaaaaaccaaagtcactgagtaatctctggctattttctaaaaaaggtcgcgaaagcggccttttttgttatttggtgcgctttgttcagcgtcgggataatatttttaaaacgttatcatgctctcgccctggatttttagccgcactacggcggcgaatttataagtccccgggagcaccggttgccaggtgaacggggggaatgcacgcagccaggacatgcgccttaaaagatgaaaggtataagccaggaattgtcctggttatattgttactcactattcctccacattttcccggtacaaaggaaatatatcaggaggtgtattatgaaaaagattctttcactggcgattattctatcttgtgctttgacttccgtctcctgggcggatggccctggcggcaacaaccacggtcagcagcaggtctggcagcaagacgccggccgcggcggcccggacggcaaccgtcagcaggggccgggcaaggggccgcaggccaacaaccatcagggtaacgacgataaccgtggcccatcgcgcggtgacaaggggccgcagggtaactctcatcaggagcgccatgagcgggaccacttcgcgtggaacggccatgattttcgcaaaggtcagccggctccggaacgttatcgcggcaatgattaccggataaacgactggaacgatcgcggattaccggcaccgccgcacgggcagcactggtcctatattgacggtaactatgtgctgattgccgccgcgaccgggattattacgtcgatcctgattaacggcgcgctgagtcactaaccttttctgctttaacctcgcaaccgcctcccccggaggcggtgctgtgcacctgtccgcgctaccgatttgcccgcgtctgagggacggtagtccggccagcctggcgctatcgggcactgcccacccgcccctgttctcacatcaaatccgcttaaaaaccgcaaagttgaaaatatcatccttgcgcctcttctttgatgttttatctgcttatttaggctttataaatgagtattgtgcttcatggttaataaaaggcagagaatgtaagacgtttcatggttcaggtgatagtaaaactcatccgcttcgccgttaaatcgctatgaataaatcagatgaaaaccccgcgcggaataagaaatcctgcttgcaataaacccttagcacgttaagttattaaagcttagcacctgattctatatcccggagaccggcatgaccgactgtgtaattcctgaaattaaagccaccgaagatgaaatgattgcgatccgtcattatttacacgcccatccggaattaagcctggaagagtttaataccagcgagctggtggccggaaaactggccgagtggggctatacggtgacccgcgggctggcgaaaaccggggtggtaggaacgttaagcaagggcgattcgccgcgcactatcggcctgcgcgccgacatggacgcgctgccgattttcgaagcgaccgatctcccctgggccagcaccgtggccggaaaaatgcacgcctgcggccacgacggccacaccaccattctgctggcggcggcgaaatatatcgcctcgccggcctgccagttcaacggcacggtacacctgattttccagcccgcggaagaagcgatcggcggcgcggatttaatgatcaaagacggcctgtttgagcgctttccctgcgagcgcatcttcggcctgcacaatatgccgggcctgccggtggggaaaatcggcttttacgccgggaattttatggcctcggcggatacggtaaaaatcaccattaccggctacggcggccacggcgcgcaccccgagcgcaccgtcgatcccattgttaccggcgcggcgctggtgatgaatctgcaaagcatcgttgcgcgtaacgtaccgccgggcgaaaccgcggtggtgagcgtcggcaccttccaggcgggtatcgcctccaacgtcatccctgagaacgtggtgatggagctgagcgtgcgggcgatgaagccggaaattcgcgacctgctgattaagcggatcaaggagctcactgattttaccgccaaaagctacggcgccagcagcgaggtagcggtttttgactcctatccggtactgaccaacagcgtcgaagagaccgaattcgccaaagcgctggcgctggacgtctttggcgaggagggcgtgctggaatccatttcgccgatgaacgccagcgaagatttcgcctttatgctccagcagcgccccggctgctacttcctgctgggcaatggcgagaaaggcgggaagggcagctgtatggtgcacaaccccggctatgactttaatgatgacattatttctaccggcgcgacgctgttcgcccggttagttgaaacacactgccgttgatctctggagtccgtaaataatgaaaaaatctcttctgctgtgggtcgcgctgatggcctcaacttcagccctggccgcagaaaataaggaaattcgctttggcgtcgatccgactttcgcgccgtttgaatggaaagatccgcagggtaagctggcgggttttgatattgacctcggcaacgcgatttgcgcccagctgcaggcgaagtgcgtgtgggtggaaagcaacttcgacggcattattccggcgctgaaggcgcgtaagttcgacgcgatcctctccggcatgtatatgaccgagaagcgtaaagagcagatcggctttagcgacaagctgtacaacggcccggtgttcctcgtggcgcgtaaaaacaccctggccgggaataccgtcgagcagctgaagggcaaaaccatcggcgtagagcagggctcggcgcaggagacttacgttaaccagcactggcgcacggcggggatcaatatcgtcgcctatcagggggcggatcgcgtggttcaggatctggagtccgggcgtattgacggcgcggtgctttccgggatgatggccgactacagcttcctgcagcagccgcagggtaaagattttgccttcgttggcggccacctgaaggacgacaagctgttcggcgccggcgcggcgattggcctgcgcaaagaggacgatgccctgcgccaggagattaacggcgcgattgccactattctcgccgacggcacctataaaaagttagccgggaaatattttagctttgacgtctattccgggacataatgttgttatgcattcagcgggcacggatagcccgcttcaagcttccttttcttactatcccgtaattgtccttttctggccctcacggcgttccgaaggatactgaatataagcgataaggagtgaacggcatgatgacacgtcccttgggcaaaaccggattttccatcgccccgctggtgtttggcggtaacgtttttggctggaccattgatgaaaaaaccagttttgccattcttgatgcgtttatagaccacggcttcgatgctatcgacacggcggatgtctactcccgctgggcggatggcaaccagggcggcgagtctgaaaccattatcggccgctggctacaggcgcggccaggcatgcgcgataaggtaaagctcttcaccaaagtgggttccgatttaggccttcccggtcataaagggttgaaaaaagcctggatccagcaggcagtggacgactccctgcgacgtctgaataccgattatattgacctctatttcgcccactggccggacccggaaacgccggtcgccgaaaccctcgacgccttccacgccctacagcaggcggggaaaatccgcgccatgggcgcctcgaacctcgatgcgcagcagctttcaggcgcgctggaggtgtcgcgtaaaagcggcctgccggcctggcaggtgctgcagccggaatacaatctttatcatcgctcggcttttgagggcgcgctctgcgacctgtgcatcagccgcgatatcggcgtggtgacctactacagcctggcgtccggcttcctgaccggcaaataccgccagcagtccgacctggcgcaaagccagcgcgggggcggtatcggcaaatatctcaatcctcgcgggctgcgtattgtcgataccctggttgaagtggcggagcaaagcggcgctaaacctgccgaggtcgctctggcctggctgatgagccgcgacggcgtgacggcgcccatcgccagcgccaccagcctcgctcaggtggagagctttgctcgcgccgccgcgctgagcctgagcgccgggcagctggcgcgtctggataccgccagcgcgtagtgattgaggccggagcctgtcgggttccggccttttgtctctccgcgttttgctgcgcgcgcttcctcaccttcagcccaaacctctgcggcgaatccctttcagcgaaaaatgaaacgtttttccagacggcaaaagccaggcttgattacgataagataatgagtatagttctcattcttcttcttgtttgcggttttatcaggagataacctgcgtacgtcgcgggctcacagggaaacggcgaaggcactggatggggctcacaggcgcaagaccggaaacgcgaatttcggcggcggagccactatcggatcgttgattttgttcaggactgatcttatgaaacgcactctcccggcgctggccgtctctgccaacttaagcggccgcgccgcaccggctttcccgctgcggaaaacgctgctggcgttaactgttggcgctatctcccattcggcaacggcggcggaaaacgtcgccgaacgccagaaaagcgaagaaacgatggtcgttcaggccgcatccgccagcgattttaaagccggcggcgacctggtggtgcccgcctatcttgacggccagatcgccaacggcggccgtctcgggatgctcggcgaacaaaacgcgatggacgttccgtttagtatcatcggctttacctcgaagcttatcgaggatcagcaggcgaaaaccatcgccgacgtagtgagtaacgatgccggggttcagccggtgcagggctacggtaactacgccgagacctaccgcattcgcggccttaaatttgacggcgacgatatgaccctgagcgggctggcgggcgtggtgccgcgtcaggtggtggataccgccatgcttgagcgggtcgaaatttttaaaggcgccaacgctctgcttaacggtgcggccagctccggcgtcggcgggatgatcaacctggagcctaagcgcgcggaagataccccgaccgcccgcgtgggcgtcgactatacctcggattctcaggtcggcggcacgctggatttgggccgccgctttggcgacgacaaccagttcggcgcgcgggtgaatctggtgcaccgcgaaggcgaggcggcggtggagagtgataagcgcagaaccacgctggcctccatagggctcgattatcgcggcgaacggatgcgcagctcgtttgactttggctatcagaaaaaaaccttccacggtagcccgatgggcatcaacatttcgggcgtcgattttattccgcgcctgccggataacacccacaactacacgcaaaaatgggcttacagcgatatcgaaaatgagttcggtatgctgagaatggaatacgacattgtcgataaatggaccgcctacgccgctctgggggcgcagcatgcccatgaaatcggtctctatagcgcctcgaagctgattgaccgggcgggcaacgccacggcggggcgcctggacaccaaccgctatatggataccgccagcggcatggccgggatacgcggcgaattcgctaccggttttgtgtcgcacaaggtcaacgtcggctattcggcgaaaacccagaacgacaaaaccgcgtggcggatgtcgaaggcggcggataatccgctggtgaatatctacgatacccgtccggttgcgcccccggcgaacgcatcattcggcggcgactatggcgatccgctcaccagcggccgcacccgttcccagggctggctgctgagcgacaccctcggcgtgctggacgatacgctgctgttcaccgtcggcgcccgtcatcaaaaagtggtggtgcgcaactacgataaagtcaccggcctgcaaagcgatgcgtatgacgacagccgctggatgccgacctatggcgtggtctataagccgtggcaggttctctctttatacgctaaccataccgaagccctgcagccgggcagcaatgcgccaacctccgccgctaactatggggaaagcgtcggcattattcactcaaaacaaaacgaagtcgggatgaaggcggattttggccgcattggcggctcgctggcgctgtttgaaattaaaatgccttccgccttcctggatagccagaaacgctatggccttaacggcgagcagcgcaatcgcggcgtggaatttaacgtattcggcgaaccgctgtacggcctgcgccttaacgccagcgcgacctggctgaaagccgaactgtcgaaaaccaaggatggcgtcaatgatggtaaaacggccatcggcgtaccgggcttctacgcggtgcttggcgcagagtatgacatcaaacctatcgacggcctgaccgccaccgcacgcctcaatcactcgggttcgcagtatgccgaccaggcgaacagcaagaagattgatagcttcacgaccctggatctcggcgtgcgctatcgtctggcgcttaacgagaaccagaatcagatgacggtacgcgcgggcgtcgataacgtgacggatgagaactactggtccggcgcggacgacagcggaacctatctgttccgcggcgaaccgcgcacgttcaaggtttcggtcggctacgaattttaaggcaaaaccgcaggagcgggcagggcggctcgccggttgtaataaatcaatgaatgtataaagccaaggcatctgcggcttgaagtatgacgattttataccctaaataattcgagttgcaggaaggcggcgacgcagggaatccccaggagcttactccagtaagtgactggggtgagcgagaaaagccaacgcacatgcagcttgaagtatgacgggtataagtgttaaaaggtgccccttcatatatacacacaggggatcgacgtgaaagacgcgtcaacgtcgtcggatgccgtagaggaaagcggcccgacgcttcatcgcggtttacagaaccgacatattcaacttatcgcccttggcggcgccatcggtaccggcctgtttctcggcatcgggccggcgattcaaatggcgggaccggccgtactgctcggctatgccgtcgccgggatagttgcctttctgatcatgcgccagctgggcgaaatggtcgtcgaagaaccggtttcaggctcctttgcccactttgcttataaatactggggcccgttcgccggttttctttccggctggaactactgggtgatgttcgtgctggtcgggatggcggagctgaccgccgccgggatctatatgcagtactggctgccggatgtgccgacgtggatctgggccgccgcgttcttcatcattatcaacgccgtaaacctggtgaacgtgcgcctgtacggtgaagcggagttctggttcgcgctgattaaggtgctggcgattatcggcatgatcggctttggcctgtggatgctgttcggcggccacggcggcagcaaggcgggaatcgataacctgtggaaacacggcggtttcttcgccaccggctggcacggcctgatcgtgtcgctggcggtgattatgttctccttcggcggactggagcttatcggcattaccgccgcggaagcgcagaacccggaaaagagcatcccgaaagcggttaaccaggtggtatatcgtatcctgctgttttatatcggttcgctggtggttctgctggcgctctatccgtgggtggaaatcaaatccgacagcagcccgttcgtgatgatctttcataatctcgacagcaacgtggtggcttccgcgctgaacttcgtgattctggtagcgtcgctgtcggtttataacagcggcgtttactcgaatagccggatgctgttcggtctgtcggtgcagggcaatgcgccgaagtttctcgcccgcgtcagcaagcgcggcgtgccggtcaactccctgctgctatcgggagtcattacttcgctggtggtgctgcttaactacctgctgccgcaaaaagccctcggtctgctgatggcgctggtggtagcgacgctgctgctgaactggattatgatctgcctggcgcacctcaagttccgcgccgcccagcggcgcaaggggcgcgagtcgaagtttaaagcgctgctgtcgcccgccggaaactatatctgtatcgcctttctggggctgatcctggtgctgatgtgcaccattgacgggatgcgcctgtcggcgattctgctgccggtgtggatcctgttcctgtttgtggcctttaaaaccctgcgccgtccggcgtagcgcgatcgccccgtcgtccggcggggcattatctctttttattgtgatcgtcttcgcgcttagcgtattttacccgcgatcttctttttgtaatcgattactttttatttgagtgtatttgtaatcgattactttttgagggcggtcgaaatggtcacaacaaccgaaggtcgtgaaagtccccgcgtagcccaccgttttctggtgccgcggctgtcgttaatgatgtttatgcagttctttatctggggtagctggtcggtgacgctggggctggtgatgacccgctatgagatgtcgctgctgatcggcgatgctttctccgccgggccgattgcgtctattctctcgccgtttgtgctgggaatgctggtcgatcgctttttcgcttcgcagaaggtgatggcggtgatgcatctggccggagcggttattttgtggtttgtcccgcaggcgctggtggcgcaaaacggcgcgctgctgattggcctgctgttcggctacaccctgtgctatatgccgacgctggcgctgaccaacaacatcgctttccacagcctggcgaacgtcgataaaacctttccggtggtacgcgtcttcggcaccatcggctggattatcgccggtatctttatcggcgtcaccggtatctccgataccaccggcatttttaccctggcggcgctctgctcggcggcgttggccgtttatagcctgacgctaccgcacacgccggcgccggcgaaagggacgccggtccagtttcgcgatctgctgtgcgccgacgctttcgcgctgctgaaaacgcgccacttcctgattttctccctctgcgcgacgctgatttcgattccgctggggacctactacgcctataccgcctcttatctggcggatgccggcatcgcggacgtcagcaccgcgatgtcgttcggtcagatgtcagaaatcttctttatgctggtgatcccgctgctgttccgccgcctcggggtgaaatacatgctgctgatcggcatggcggcgtggttcgtgcgctacgccttctttgcgctgggggtcagcgaagaggggcgcttcctgctctatctcggcatcctgctgcacggcgtgtgctatgactttttctttgttgtcggctttatctataccgaccgcgtggccggtgaaaaagtgaagggccaggcgcaaagcatgatcgtgatgttcacctacggtatcggcatgctgctggggtcgcagatctccggcgcgctgtacaaccatctggtggcaggccagagcgtaccgcaggcgtgggtgaccttctggtggatcccggcggtggccgctgcggttatcgcgctgattttccttttctctttccagtacaacgagaaagagcagcgttaatttttcaggaggtggtatgaaaacaatcaaaggaccgggcattttcctggcgcagtttatcggcgcgcaggcgccgtttaataccctggagggcctggcgcagtgggccgccggtttgggctatcaggcactgcagatcccctgtaaccatccggcgattttcgacgttgaacgcgccgccgcgagccagacctactgcgatgaggtgagcggtatcctggcggaacagggcctggcgatctgcgagctgtccacccatcttgaggggcagctggtggccgttcatccggcttatgatacggcctttgacgcgtttgcgcccgccgcgctgcgcggtaacccgcaggcgcgccagcagtgggcggtagaaaaagtacgccaggcggcggtggcctcggcgcgtctggggctgaaggcgcatgccaccttttccggggcgctggcgtggccttatttttatccgtggccgccgcataatcagccgcttctcgatgaggccttcgatgaactggcccggcgctggcgaccgctgctggatgtttttgacgaacagggcgtggatgtctgctacgaaatccatcccggcgaagacctgcatgacggcgtgaccttcgagcgtttcttgcagcgggtcgataaccatccgcgctgcaatatgctctatgaccccagccaccttcatcttcagcagatggactacctgggttacatcgatatctatcattcgcgaatcaaagcgtttcacgtcaaagatgccgaattccgccgcgacgggcgcagcggggtctacggcggctatcagaactggcagcagcgggcggggcgttttcgttcgctgggcgacgggcagatcgacttcaaaacgattttcagcaagctcaccgagtatgattttgacggctgggcggtgctggagtgggagtgctgcctgaaggacgcggaggtcggcgcgcgcgaaggcagcgagtttatccgccgccatatcatcccggtctccgggcgggcgtttgacgatttcgccgcaggcaaggagggggaataatgattcaggtcggcattattggctccggatttatcgggccggcgcatctggaagcgctgcgccgggtgggcgacatcgaggtggtggcgctgtgtgacggttcgctggagatggcgcagcagaaggcgcgccagctcaacgtggcgcacgcctacggtagcgttgaggcgctgctggcgcatcccgggctacaggtggtgcataactgtacgccgaaccatctgcatgcgcggattaaccgacagatcctctccgccggactgcacgtcttttcggaaaagccgctctgcatgaccgcggaggaggcccgtgagctggtggcgctggcggaaagcgccggggtgattcatggcgtcagctttgtttatcgccagtttgccatggtgcagcaggcggcggcgatgatgcgcaacggcgatgtcgggaggctgtttgcggtgcacggcagctatttgcaggactggatgctgctggagaccgactataactggcgggtggattcggcgctgggcggggcctcgcgggcgatggccgacattggttcccactggtgcgatacggtgcagtttatgaccggccgacgcattgtggaggtgatggcggatctctccatcgtctggccgacgcgccaggcgcccgtggccggcgacgcgacgttcagccagcatcgcgatgatatcgcgtatgaagcgcggcccgtcgataccgaagatttggggtcggtcctgtttcgcttcgacgatggcagcaaggggagctttatcgtttcgcaggtcagcgccgggagaaaaaacggcctgacggtggagatcggcggcagccgctgctcgctggcctgggatcaggagctgccgcagcggctgtggattggccatcgccaggggccaaaccagctgctgagcgacgatccgagcctgatgctcggcgaggccgccgccagcgcccacttccccggcgggcataatgaaggctggcccgatgcgtttaaaaatatgatgctgagcttttatcaggcggtgcgcgccggtgagatgccgccggcatcgtcacggcgtttcgcctcgttctacgagggggcggacgtgatgtacatcattgcggcgatagtgaaaagccatcagcagcagcgctgggtgaaggtggaaagataagccgaaggcgcggtgcgcatttcgcgcacccgctgggttatttcacgccaaaatagccgtcgagatacgttccggccagttcattaccgaacagcacggcgtctttattttccatttcgttatcccatttatcgctgacgttgccggtaaatgcgtgctgggtttttgtgccctcagccacctgctgcctgattgcgtcggcggtacggcgggcgtcgctttcgctcatccccgactttctgtcctgctggccgcgggcatagatatcggtaaagttcggcagatttaagcggtagttttcctgacggttactaacgaagttaccgccgacgaaatcgctgcggtgtgagacaaaatagtaagcgtggcgttccggggaagattttgaggaggtacagccggaaagggcggcaagcgaacagccaagcgcgataaacgctatttttagtttcattgatatcatcatccataattattagaaaaggtactctgataattcaggtacaggacaaaacggctaattatgtctgtacggtagcacctgaagacccatgaatccaaggggcttcaggcagcattttttagatctgcgccagcccgccatcaacgtagatttcagcggcgttaataaagctcgcgtcgtcagaggccaggaaagccaccgttttagccacttcttccggctcgccaatgcggcccagcgggacgtcggcggccagcatatcgaagagcccctgacgttgctctggggcgacaagtccccccagaccgggcgtacggacgggccccgggctgaccacattcacgcggatagcgcgcgccttcaggtccagcgcccatgagcgggccagattacgcacggcggccttactggcgctgtacacgctgaagttcgcggtgcctttcaccgccgccgtcgagccggtaaggatgatggaagccccctgggtcaacagcggcaaggccttctggacggtgaacagcacgccgcgcacgttggtagcgaaaatgcgatcgaagtgctcttccgttatggcgcccagcggcatcatatcgccgccgcccgcattggcaaaaagcacatccactcgccctgattcgctggcaatggtcgaaaacaccctatcgaggtcgcttaataccgaggcatcggcgcggatcccgctggcggcgggaccgattaacgcgaccgccgcgtcaagctcttcctgacggcgaccggtgatatagaccgtcgctccctgcgaggccagctcccgggctgatgccaggccgatgcccgaggtgccgccggtgactaacgcgatttttgccgaaagttttttactcatggtgcacttccttaactaaagtatgaatatgccaattgagtcatccacttaccgtgactacctggcgactgagtacgggggtcactctaccgtcagccacggatgcaaaaaacggagtaatgtgaaaaacactcttcataccggtgaataatcagcggctattatcaggaaaaatgaataatggatcggttttcagcccttaaagtctttacgcgcgttgtcgaagccaacagttttacccgggccgcagactccctgaatatgcccaacgccactctcagtaaagcgattcaacagcttgaatcgcatcttggcgtgtgcctgctgcagcgcacaacccgacgcattaccgtcacgccggaagggcgtgaatactatgaaaaagcggtgcgaattctgaaagatctggacgagattgatgcctcatttcgcgcttcccgcaataagccaaagggccacctgcgcgtcgcggtaggcggctccaccgctcgcgacgtgctgatcccgctgctggctgattttatgacgacctatccggatatccgcatcgatctggcggtcgctgacagcccctcggaccttatcagcggcaatatcgactgcgcgattagaggagggccgctggacgactcgacgctgatcgcgcgcaaaatcggcgaagcaacgattgtgacctgcgctacgccgggctatttcaggctctacggcattcccgcgtatcccgatgagctgaagaacggacatcggctggtcagctatttatctcccgccagcggaagagccttcccgttccgctttctggataacggcatcagtcaggagatcaaaacggaacatcaccttggcgtaaatgagagcaacgcgcatatcgcggctgcggaggctgggctgggtattgtgcagaccttctcatattcgttgagaaatgcgctggtgaacggaacactagtggaaatactcagcaaatggcgcccggccccttatccctttcacgtggtttatgcgcagaatcgccacgtcacatcccggctgcgcgtatttatcgactggctggcggaggcatttccggcagcggtaaaagggggctaaatgagaggaaccaacatataatggcagcctgtgaaaaatattcatcgtgtgattataaatcaagtaacaataaatattacgcccgcttacagtatggggatatatttttctatataatatgacatggttaaattcagtgggtgttttattaaaatatttaatgaaatgtgttaatgttatttgccctaaggtctggaattatagattagtcttttttttctttgtttacagtaaatataatagcagcaatttattttgtttatagtatgtttggtattacgtatgtatcttttttgaaagtattttttagccactcaagaggtaaatataatgccggcaggtaaccgtgagattaaatgtatggcgtgtggtttaaactgccctattgaagcggaagataaaatggagcgatccctttgcggagagaggaagttttctgtatggccggataaaaactatttttttaagcgagcggtcaatgatttggtttttcgtgaactcacctgttttctgcctgaaggaatggtggtggtggacttctccctcgacaatatcttgtattttctgcatgagggctgggctgaaaaactgcaggagaccggtctgaagattattttactcgcggataaaagcatgctgcccatggctaatttttggatgctccgctccggattattatggtcggtggtggaggtcaacgatagcttgagcagcttaatcaagaaaataaaacgcatcatgctggggcggaatcttcgctgtcggcgcaccccgtcgctgactgagcatgaaatgaagacgctgcgcctgctggcagacgggcattccagtcaggatatcgcccgcatcatggcatgcgatacccgcagcgtctaccgctttcaatactctttatgcaagaagttcggcggactcaatcgcctgcgcgagctgcgcttcaggcataccatacccgctctggattagcagcgcttaacccggcgaatctataaaacagccgtttcctaactgatgatagcggcctaatgcgacaatatatttcctgtggctattgttcgcttcggggcctgtccagctctcccctggtagcatataaaattgcgttgaactttcatcgtcaccattgcagcctttctgcagaatgactctaaaataggtgttgccggtgtttttaatggtgcccgtggcttcgttaatttcatactggaatcgcgtcttgcgggggcgcacgatgagaatcgtgctcatcgacaccgaagggacaaccgccatttttttctgatccatgcgccaggggaaaaccgtgacgggcgtttccttaaagatcacccgataatatcgctcaacgtcatctttgggcccgcgataatagagtttaaaatattcctgacctttggcctgtacggtgaactgcagcggcgaccagaccaggtctttgctctgaccgggcaccggtatttcatcaccgttgcccggccgggagattttgtaagccgaaatggtatataagttagtgctttttgtatcgttgactagcggccgggagataaaatctttactggcatccatatcataaatgatggaatcaaagtacaccgcggaagcgggctggacacacagcccgcacaatccgatggccaggattttttgcatcataccccccgatcgacgccgacccatgtggcggtcacttttacatccccggtggcgctgacggtccccatccagtcatgtccatcggtggtgaactgtgaatgcgggtcatccatcggaaacagcagtttcagcgtggtggtaaaaaagaaaccatcgttgacgttagcgttccaggccgtctgtacccaggcggcgttggtcatatcgacagggttttcaccgcagctgttgcggacttttaccgctttaccggcagcggacgtccattcgaggtaggccgggatggggacttttagcgtctcgtccgctgaggtaaacaggcagtacggcagaccatatatgttgatggagtcgccgatgacctgggcggtaatactgtcggcctgacgcgacgcggaggtggtgactttatattcaaaagtgatgggctcttcgctaccgatcttgccggatgctttgggatgagaacgcccgtcgctggcaacaatgctgataccgtattcccgcgggatgatgttaattaatgtggaaggcgtgaactgataataacccgattgcggggtgacggagttatcaaaatagaaggtaaacagttcattcttgttggttaaatccgttcctgccttgagggctttttggaaaaaggcattggacaggaatacgtagacgtactcgcctgacggcttgaaaaccttgttataggtaatggcagtaccgaaattagtccagctagccccatcaccgctgtactttacgtcagacgaagaaggggaaaatcccagcatcgccgtgtcgataaccatccggaaatcaagtgaggtggtgagggttttggtctcctgaaagttgtaagacaccattttacaaatgatcccggaagcgctcccgactacgcccatctggcacaattcagagccgaggttaacgcttggcgtaccgtcgctggcaatccacacttccgccatagatccggtactgtttaaggtcagatgcgagaccttttcgaggttcatcgtatagtaaacccactttcctccgctggggagatctttacagcgaacgccggaagcaaagtcataatcggctttggagtccatatagcagagattaagctgcaaactatcgatggttcccaccggctgattgcgaaaatactcataggccgactggctcagcactccggcgccgtagtaaccgtttgctacgctgttgccggacatcgcgtgatagtaaccgtctttgtcgaggacatccgcagggatatagccggaagccgggcagtttgcgccagtagacatgcagcggagcccgagaaacggttggttaatgggggagttgtcgatccagagatcaaaatagcggttactgtaactccagcccgagttgcccagatatcccagactacgctggttcgttttatatttcgtccagatattggccccggtgaagcgcggggagagggagctggtggtgatgaaatattcatcatcgacatcattgtcgataaacatataggtgttgctgccgctcccgtcgttggtagcggtgagcgccatagccggcgcggccagcagccagccggccagcagcatgatggcctggggtttaatagacattcttaacatctccagtcactgatgccgtttgttgttggatctcacaagggatctcaccgacccatacggcgcctttcgcctctgtcagatccagatccacttcgcagatgccgccgaatttatcgaccagggtgattaccgggaagcgcttatcgacgtccatggcgaactcgccgagttcgtcggtgcgcgttttaccaatgtggttatgaatatcggcgttggcgtagtaaccgccgcgacggtctttcacccggccaaatacggtgaccagctgtttgacttccgggttaagcacgctgacgttgccgggatagagcacgactttgttacgtcggccggtcacgatatcgacgctgtcttccgaatttttgtcgttcatcagctccactttatattccgcgtaaggcggaagactgatgaagttgcttttgccggtcagcgggtagttctggccgttgatctgcgccatcatcctgcccttgccgctgaaatgggtattcaccaccaggcccgcggtttgggtgccttttccggcatagatatttttttccgtccaggccacgctgccctgcgagctcaggctgtagtttgaactgtgctgcgatgagcggctgacggagacggtgccagcgttatatttggtgtcatagctgacgtaaccattggcggcgtaatcgtcggtgcgatagcggctatcgtcatttttgttctgtttaatctgttttgaaaccgatgctcccacctgagtaatggcgctgttgtcaaagctcttgcgcagcgtggcgttcgccagcatgttaccgttctggctggacacgccggtgctaagccaggcggagaaggggatagaaacgtcaatattgacgtacttatcgcgcagattttcgtgggtgttgtactgataattctgaataccggcgcgcagagaaatcgtcgcgtagcgattggctagcagcgattgatcgtaatcgacgttggtataggtgctcccggtatatttgttattggttcggctgacgctcagcgtaccgaggaacggcgcgattttgcgcaggttcgcgttggcgccgacggtcacatagtcgttttgctgcatcggtagcgcgttaccgatggaactgtactggcgcgatccccacaggttgccgtacccgtccggtaaactcatattgaaggtggaggtactctgccagctgccgtcggtagcgagcagcccctgctggttaaagctgaacgcgttgttgaaaataacgttcgcttccgtttcattgacgccgttattgtcaaaaccgtagagcgtggttttcagattcacgccggaaagccagggttggctggttgcagcggcgaccccggctatccacgtattccgtgtaccataattgatgttgtagttgtgacgatagtccatcttgttgtattcgaggctgcccgcgaaggtttgccacgagagatcgccggtgacgctcgatttccgggcgaacgttttattgatgttcgccgtccggctgctgaccacgcgcccgttaacgaccacctgtatatcaacgttgtagatgccaaacggcaggcgcgacgtatccagttcgtagctgcccatggagaagttttgaatgctgagcagtttaccgtcacggtaaacgtgcacttcaccggcggctggcaggaacaccgttacgggcaccagagcaagcgtattgtcttgcgtttgggaactgcttttattgccatagctgatgccgtaaatgcggctggagttcagggcgctcatgctggcgatcgattgcagattccaggtatccaccattcccatggcgaagcggcgtccctgatagtcacgttcgtacatcgagcgatacagtttaccctgctggttgccggtaccaattccgtagagggaaccgttaaagttcagatggtgctcgcgcagcgaccaggtattgtccagcgtcaggtagctgctggcgttatcggtattctcatatttgttgtaatagctccccatcgagtaattcagcacgctcgagagattctgagcagtggattccccaagcatgttggtacgcggcaaaatagcggcctgcatggctgcccggttaaccgtcagctcaagataaaaggaacgcgtatcgagtgaaagtgaggcgtctttgttgatataaacgcgctgaccgtcgccgatgcttttgtcctgcatctcgttgagcaacgattttatctgcggtgataattcggttcgctcagggagatcgctcagcgcgatctggttcaggcgaaactcattatccttgattgtgaggacagcatcggcgattttttgctggctgcgttgggtactattatcgccttcataacgaataaaaacagggaccgtcatgccctgatataacgcgttagcaaataccgaaggaataacatagttactgactttcactggcgctgtagcattagctgcccaaccctggtttaccgtgatcaataacccagcgaacaacgtccctttgacataaccaagattatccataatgttactcagtttacatttatatattgctcaccgtgccatattccaattcgcgtttgtttgttggtgagatcggtatgctttatttttacgctgacaccaggcatgacataatagcgttcacggcagccttgaccctcatccttcgctttatcacgacagggcccgtaggagataacgcggaatgaagcgttgccggtattggtgaccgtgtcattatcgcgacgatagtcaaatctttcttcacgcggcgcgaccaccagaatggtaccaataatggcagaggtcgttgcctcaccctgttttttcttcttgctggcttcgaattcggtcaccggctcatcggtccaggatatgcggtaataacgttcctggttgtcctgaggtcctttgtaaaaaaaacgaaagttctctttggcatttccgggtaatatcagactggctggcgttgataataattccgatctgctcgccatcgggataaccttgccgccggccataggcgatgagatacgctccacgctgacgctaacgtaacgcgccgtatcggtggtattaatgatttcttttgccagagtcgaggcatccggccccattattgaggtgacgtctccgacattaatcgcataggaggagggcgtcacggtgaataagaagagagagagtaataatggattcagtttcatggcgcatccttataaggaggccgaagcctccttgtcataccggacaggtgttggctacacctgattagatagtccagaccgcgttgaactgaacgcgaacgtcgccgctccagtaaccgtcggttaaatctttgaactcagcggcggtgctgccgtcagaagtcgcagagtcgacagtgaaatcgaagttaccctgagtgctgacgcgatcggcgcctgcgaaggcggtagcgacagccagcgcatccagacccgcggagatgttgttggcggtatcaatcatcgttaccggcgtggttttgttcagcgcgttgccgttccagctcacaccaacggccagagtagaggcatcagtggtacggctcagggtgttgctgacgatctgagaggtcagcgtgaagtcggtcgcgccagactggccctggatggtgatgtcaaaagcgcctttctgggcgttaaacgctttaatcccttcagcgtactggaagttcagggatttcagcggagtgacgaccagcgcgctggtggtgtctttagttgcgcttgcatcccagcttgccgtggcggaagtggtcacgtcagccattgcgttggaagagataagagccgcagccacaacacccgctaatacgatttttttcattttaaatttcctgagaataattaagttagttccatttatggagttattgctacaaatactgataatgactttatccagatagaataatgtttaacttccctctgcctcccatcttattctgcaagctgagcttgattgcgtagattcttttttcggccatctgcaattcgttggctatttgcttaatcgacttttctgcgagtaaaagatcgagaaccaacacttcctggtcgctgagtttttggcggtaacctcgaccatctctttgaccgagaaacgaaagctgtattttctttccaatctcatgccgggtatcgctggcgttgataatcgaaattatctgctgacagcggtgtttccagtacagcgcgagcggttgtgctaatctgtcggcaatcaacactacccgcaatcctgttttgatcagatattcaagccatttattattggtgaataatctgatgttgtagcgagaaaaatcaacaaaaataaagccagaattagagaagttgtagtgcttgttaattaaaaaacaatgcacaccattttttaaatagatgtttttatcgggccatacgcaatagcgggtttcaatgcagttaatcgattttatcgttggtcggggatagatttcgcattgatactgacagcttatgcagtataccttctcatatttctgtggagccatatgtcgatttatttccctatattgtcttaccctatcgttcagtgatgtggctatattatggctagttaataaatgtgacaactttaatttctggatggttatatagatgaaaaatgtgtaaattcttaatgccaaaaactgtctggatttatactaacctactctaatgaataagaaaaatctgaagatgcagagttttatgtcgattcctctttaagaattatccatggtgaccaggaattttctcgctgaatgggagaagattggttaaaaaaaaacagcacaataagtcaaaaaaaacgctatcccatcactttttgttagttttgtgtttttattttgttttattttatgaggtttattatgtaaacacctgctttttgtaagggaaagttgcgatattttggattaatggggaaaggatagtctggtgaaatatgatctggcgtacaaaacagggcgtttttatgcactaaaacgcgtcggcgtttgaaggggagtgaatcagaaggatgcattaaatcttaaacagaagaagaggacaaaggattttcggagagacatggcgcttcagcctgaactggctctgcctgcaagccgccgtagcgcacccgggacgatggcagcgtggattttgacttgcagacaaatgagcgaatactttcgatgcgccccggacgcttacgcccctttcagcagaggaagcaggtggttctcggtaaggggagcaagcttaatatgccgatcctggcccggcgtataccagataacttcttctatttctgccgtcggtgtaaagctcgctctgttggtggctatctgaaagatatccgcagagaccgtatggcccggctcgtttgccgccgtatcggtgaagtggcctaacgggaccagttcttcaggtgagacgatgaagttgagctcctcttcgagctcgcggatcagcgctgcttccggggcttccccgatttcaggctttccaccgggctgcataaagtactcagtccctcgtttgcgcactaaaagacagcgtccttggccgtcggcgatcactgccgccgcgatatgaatattttttattgtgttcaagagataccccagttatatgccgatgatgttcaacggccagcgtacgtttcatctctcgcgaaacaacgccggcgctatcatgatagcgaccttagcgtgctaatcaatcccgtcgattatcgcaaaacctgctgacggcgcaggcggggctcatttatgatagcctgcgaaatataacgtctatgcgggaagtgcagcctctatgtcaattcagaaaatcgctcgcctggcgggcgtctcggtggcgacggtatcgcgggtattgaataacagcgataccgttaaagcgaagaatcgcgaacgtgtgctgcaggcgatcaaagagagtaactaccagccgaatctgctggcccgccagctgcgaacggcccgcagcaatatgattctggtgatggtctctaatatcgccaaccccttttgcgccgaagtggtcaagggcattgaagaagaggcggaaaagaacggctaccggatcctgctgtgtaattcaggttcggatttagcccgttcaacctctgggctgcagctgctctccggcaaaatggtcgacggcatcatcaccatgaacgcgctctccagcctgccggaactcaccaccatgatcggcgacgcgccctgggttcagtgcgcggaatatgccgataacggcagcatctcctgcgtcggcatcaacgacgtcgacgcggcgcagggcgccgtttcccggctggttgacggcgggcgtaaacgcattgctttaatcaaccacgatctcagctatcgctactcgcgcctgcgcgagcgcggctataaaagcgttttgcacgttcgcgaactggcgtatcaacaggtgatctacgccagcgatctgagcgccgcggccggtaaacaggcgatggagacgctgctggcgcaggaagagcagccggacgcggtgtttgccgtctctgattcgctggcggcgggcgcgctgcgggctatcgctcaggccggaatgcgggtgccggaagatattgcggtggtcggttttgatggcaccgaactggctgaagtggtatcgccgcagctgaccaccgtggaacagccttcgcgcgagattggccgtacggcggtcacgctgctgatgaaaagaatcgacaatcccgacgccgcggtcgagcgggtgatgatggactggcgcgtcatttcccgcgccagtgcctgaggatattactgagacaccgcgcccgccagcgaacgaatgtcgttaccggtaggggactgatggatccgcaggccgaattcgtcaaccacggcatagacgtgatcgaatatatccgcctgaatgctttcatattccgcccacaccacggtgttggtgaagcagtaaatctcaatcggcaggccgctggcgtccggcgccagctggcgcaccatcagcgtcatatctttacggatgcgcggatgattacgcaaatactcctgcaaataggcgcggaaggtgccgatattggtcatcctgcgctgattcaatatcgattgatcggcggcgttctgctggttccacaggctgatttcctgatgacgtgaatccatatacggcttcagcagtctggcctgaattaagcgctgctgctcctgttcatcaagaaaatgaatgctggtggtatcgatattcaggctgcgcttaatgcggcgaccaccggatgccgacataccgctccagtttttaaacgagtcggaaaccagcgaccaggttggaatggtggtgatggtgttatcccagttgcgcaccttcaccgtggtcaggccgatgtcaatcaccgcgccgtcggcgccatattttggcatctccagccagtcgccgagcttgagcatatcgttggcggagagctgaattcccgccaccaggccaagaataggatctttgaataccagcatcagtaccgcggccatcgcgccgagtccgctaatcagaatcgccggcgactggccaatcagtaaggagataaccagaatgccgacaataatcgcgcagaccagcttaataccctgaaatatccctttaagcggcagctgagaagcggtggcgaatttctgcgataaattgaacaccacatccagcagcgaaaagaaggacagcatcgcgtagatcatcacccacagctgcgcgcaggtggtgagtatttccgcggcctcgctgcctttttgcagccacaacaccgcctgcacgttgacgataatcccctgcagggtgaaggccagacgatgaaacagtttgttctgggtaataatttgcagccacaggtggctgctggcctgcgcccgcttttcgaaggtgcgcagcaccactttgtgcagaataagatgaacgacaatcgccgtcagaaaaataatgccgaagataataatgagtgaggtggtgggggtaattttgatgcctaatgcggcgatttgcgatatgaattcctgcataacgtctcctttacatccagcggttatgatgaccgctggatgtctattatgcaaatcgcaggttacgctgttgtgaattatggggtcgctaccgccggacggacgttaaggtgatggcgtagccacagcgcgatggcgcccaggaccagcatcatcaccacttccaccgccaggaaatcgatcagcgcccggggatagtcgccgccgctgcgctgggcaagggttaagaatagcgacccgagaattgccgggcccaggcccagcgtcgcctgctgcagagtgctgagaatcgcgctcccggccccggcgtcgcaggcgctgatatcgcgcatcccgatacggtaaaagctgttgacgatcagcgcctgcccgtagccgatgagcgccgtggaggggaccagcgccagggtggtggtgtggataccaaggcgataaaaggtcgcgctcagcagcagcaggccgacaatctgcaccgacaggccggtcagcaaaatgcgccccatgctgtagcgggcaatcagcttcggcgcgtacagcgcggagatgaagtaggccacgccgagcgcgataaagctgttgccggactgccacggcgccatccccagaccggcctgcatggtcagcgccatgcagaacataaacccggaccaggcgctgaaaaagagcagggcgatggccatgccaaagcgaatgctggtgagcttcagcaggcgaggcggcaatagcggctgctcgccgcgctgctgtttgctcagcgcgctggcccgcatccagaccagcagcggcagcaccgcagctaacatcagctgcagcgtccacggccagtgcagctccggccccagcgccatcggaaacagcaggcagcagaggattagcgcaagactgaaggtgccctgccagtcgatgcgcgaatgcgcttcgcgccgggtctccgggacgtatcgcgggctgaaggccagcaccagcaggcagatcggcacgttaataaagaaggcatttcgccagcctaaaccggcgatatccgccgagaccagccagccgccgcccatctgaccgacgataaaggcgattccgccaatgccgccgtagaggctgatggcccgggcgtgggcggtgcctttgagggtgatatgcagcgtagcgagaatctgcggcacgatcagggccgcgccggcgccctggaccgcgcgcgccgccagcagcgtgctgatggagttcgccatcccgcacagcagggaggcgacgccaaaaatcgccacgccccacataaacagacggcggcggccatagttatcgccaagcttgctgcccatcgccaggcaaacggcaaaggcgacgccgtacagcgcgacgatcagttccagctgggtggcgctggcgttcagcgactgggtgatggagtccagcgcgacgttggcgatcgaggtgtcgatcagcggcagcatctggccggtcaacagaaggaataaaccggcgcggccgggtgaaacagcagacgaattcatcggatctctccattgcgtcattcagcggatggccgtagcatcaccgataaattaaacgggtaccagttcctgcttatactggtattggcactaccatgctggaggttttatgacgaccatgccgcaacgtgaatcgacgatcgccgcgcccgatgatgcccgtaaacagctgggggcgtttctgcgcgcccggcgtgagagcctcgatccgcagcgcctggggttgccgcgcgttggccgacgacgcacgccgggcctgcggcgggaagaggtggcgatgctggcggaggtcggcgtcacctggtacacctggctggagcaggggcgggaagtgaatccgtccgaggccgtgctggtgtcggtggcgaacgcgctgcagtgcagcccgctggagacccggcacctgtttgtcctggccggactgacgccgccggaagccgcgcaggtcacggtatgcgaaggcatcagccccggcacccggcggatgctcgatagcctgatgccgcagcccgccagtattcagaagccgagcttcgatattgtggcgtggaacgacagcttctgccgcctgatgggcatcgatttcgccaccattccggaagaggatcgcaactgcatttatctgtatctgaccaatgaaacctggcgcagccgtattgaaaatcgcgacgtgctggcgacgtttgtctcctatttccgcgcggcgatggcggagcaccgcggcgatccgctgtgggagaataagctggcgcgctttttcgccgcgtcggcggagttcgaggcgctctggcatcagcgctatgaggtacgcggggtggaaaatcaggtgaaacactttaaccatccgcagctcggacgcttcagcctgcagcagatgtactggtactcggccccgcgcaacggctcgcgcctgctggtctatttgccgatggatgaaacgggcgagcgggcgctggcgtggttggataaataaaaccatatattgctggagagtcagagcgggactctccagccacgttttgccagaggggtaaatcctccgcgggtaaggttcgccgggagcggatttgaacgccgggtaacggcggcctatcagggcgaggcccatggatgggccgagtaatccgaagacaacgcacaggcaacctgaagtatggcggggatagatatttctctgtttattgccaataacccggctgtttgcttattctggcgatagcgtggccagggtgaagacgataattaaataatcatttacgccaggaatctattaattgtggcggcgggaggttgagtcatcctgggaaaactatccaaagattaaataagtgtttttgttattatcattatccatgatgatagttccggcgggttatgtgacacagtacaaataattacaattattgagcttgttgagaatatatttcacatgcgttgaatgcatggtttcctctattgtgataggttgcttgttaaataataaattcatataaatctatatattttcagaacatctaaatataacggggagttgaatgaaacgaattgaccgggtttaccattggctgctggaacacgcagacaaaatgagctggcatgatatgtgtttgcagagagggttcaatacccacgatattgctgatgggctgcgtattttgcgaaacaatgtcagtttcgaactgggtaatttgttacgtatgcagcagatcgttaaagtgaaaggaagaccgatagcctacattcctaaagtcagcgttgaacgtgcgttgggtatctctctgtcagaggtggagtttgacagttttgatgcgctgaatgcgctggtttctcctggcggggaagtcgcggcgcaggcgccagccgattcgcgggtttctgagcaccggagcgccgatccttttagtttgctgattggcttcgatggcagcttaaaaacgcaggtcgaacaggcaaaagccgctatcctgtatccaccgtccagcctgcatacattaattaccgggccgacaggcgttgggaaaagcctgtttgcttcagttatgttcaactatgcgtgttttgttggccgttttgatgcgaaaaaacccttcattgtgtttaactgcgcagactatgcaatgaacccgcagctgctgatggcgcatatttttggtcatatcaaaggggcgtttaccggcgctggcgaggacaaagagggattggttgataaagctaacggcggaatgttatttctggatgagatacaccgattaccgccggaagggcaggagatggtcttctactttatggataccggtacctacagccggctgggggaaacggaaagaagacgtacagcgagcgttttattggtgggagccactaccgagaatttagaatctgcaatgctcaagaccttcattcgccgtattccaatcatcattcatctgccaacattcgaacggcgcagcacccaggagaaaatatcgctattgaaattcttattgaatagagaagcacagcgtattcagaaaccgatcagaattgatgtagaagcaatgaaggcgctgataggtaacacttcttttggcaacattgggcaaatgaaatccaatgtgcagctggtatgtgcgaatggctttttacactgtttgcatcaagatattattgatatccgcttccgcgatctgcccagcgaaattaaaaatggcctgtttcatctcggcgcacggcgcgatgaaatgcagcagatcaatgattaccttgaggattttttagttattcagccgggaggcgagccgtcgccgctgcaggaagacgatcaatatgaacccactttcaacctgtataatattattgaagataaagtcacttttatgcaggatcatggcctgtcccatgaggaaattacgcgctttattttactggacatcagcattcatctgaatactttttatatgaagtttcagaacaatgccgggatgcaggaaaatatattaaaagtagtcaatgaggatatcctgcatttctcacagcagatgaaaaaaatcgtggaacgggaattgaatcatcatctgacggagcgctttttattggcatttagtttacatctaacatcttttttagcgcgaacggaaaatcgccataccgctctgcttccccgtattgagcatctactgatgaaccaggggcaggagtatcaggccgctaaaatagtcaagcagcacattgaagacaaatttggcattgatgtgcctgtcgtcgaagagatgtatttaacgttgctgattggttctttgttgaaaacccagcaggaagagcgtgttgcggtacttgtcgtaatgcacgggagccataccgccagttcgatggctagcgttgcccaaaagttactgggtgagggcaatattgacagcattgatatgcctttggacatcagtcccaaactggtgctcgatcaaatgcgccagcgtattaaagagctgaattgcaacaaaggcgtgctgctgctggtggatatgggatcgttgaacggttttggcgacattatcatgcaggaaacgggaatacagatacgcacattaaccatggcttcgacgcccacggtcattgaggcagtaagaaaatcggcggtcatgggaatggagctggatgatatctacttttcgctgtgcgatttcaagggatatggcagttatcgtaaaacgacgcagcagctggatacatccatgctttatcagaaagtgaaggcgatcctctgcgtgtgctcaaccgggcagggaacggcggagaagctgaaaacctttgtcgacggtatgctgtgtaatatggaacgttgcgatattaacgttatcgcgatgccgctgaatgaagtcgaaatacaaagagaccttttactcaaacgttacgagttcattatgtctctggggatagcagatcccagaatcaatgcccctttcttacctctggaaacgttgttttccagcaacggtgaggcgcagtttacgcttctcgttcaacggagccatttacagtcggttattcggccgcatgcgatggtgcgcaaaattagcgaggagagtatgaccgagtttctgacttaccttaacccgaaaaaagtggtcgatccggtgctggagtatatcagtgagctggagaagctggagggattccccttcgataatggcatgaaggtcagcatcagcgtgcatatcgggagcgcgctggagcgaatggtacaacactgtggcctgaagtatgatggtagccttagcgaagacaaccagaaaaaactggatacctaccagacgattgctcgttgcttccagaaaaagctggcgattaccctggatcgcgacgagcttagctacatcctggagatggtcgcggaactctccgagcgttcggctgcacaacaggaagatttatcgtagtcgtttaatggcctctttcagaatgcgcaggttctccggcgccgggcggtttgttctgtccggtgaagcgtgacgtttttcgcctactggccgttaaatgctgtgggtagatcgtcgatgaaaggcttcagtagacgattaaagctactacacttggttgattctggcgtgctgtcgcgctgcagatgttgataaatttgctcactccgctgcgatacggctttatcttcagcgatatcccaaccccgctgcctggctaccttatcaatagcgttggtcatgaccgcgtcgctgggtaaatcactgcggtgacattgatatttcagatattttgcgctggcgctcacggaggccagttgttctatttgctcgtcaggaggaataggcttttgttgtaatgaagaacgggattgttgacaacctgtgctgactagcagaaatgcaatcagcataaaatggcaaaaacgagatgaccgcatggcaataatcttactcttatctaaaaaacagcattctagcaagttacccccggttgtcacgaattagcgcggccggcttactttattgcgatcttgttctcatatttgcttttataatttctgatttatcccccagtgaatccatcacgccttcggctaacacttcttaatattcacgctataataatagtgtgatacacatggatttgtatccttaattccctgttctagtgtattgatattttaatacacaaaaatatagcccctttcacaaaccccgagttcatcgacttctcagccctgttaacgtcattaatacactaacctggcacattctttgctggtacagactcgtatattattttcgctcaataagattatggtttcatttactaaaagcagacgtgatggtttaaacaggaatttgaatcaatgaatacagcaatcatagttgctactcatggcgcagccgcaggacctttgattaataccactcagatgatcgtcgggcagcaggaaaatatcgccacgattgattttctacctggggaaaacgttgatacgttggtcactaagtttgaaaacgttctccagacgctggatcaacgagatggcgttatctttctggttgatatttacgccggtagccctttcaatgcggccagcttgctatcgatgaaaaaagataactgggatgtaataaccggggtcaatgttccgatgctgatcaacgtgtttttagagcgagagagcgtgggggaatacctgcaattagtcgatatctcaaaacaaacggcaagagatggcattaagtctctcaaatacagtttaaataacaataatacagaagaggatcatctttgaaatgaatgttttattatcacgtatcgacgatcgttttattcatggccaggtggttacccgttgggtaaaagcgtatccagccgatcgtttaattgtcgtctctgatgccgtggcggcggatgaattgcgcaagtctctgctcatctccgttgctccttcaggcatgattgctagcgtggtgtccgtggaaaaaatgattaacgcctggcatagccctcgctacgcaggggtcagcgcatttctgctatttgaaaaaccgggggatgttctgcgattaatcgagggcggcgtcgcgattaaaagcgtgaatgttggcggaatgcgctttgagaacgatcgcgagcaaatcaccaaatccgtcagcgtaacctcagacgatgttgcggcatttcatgctctgcatgcgttgggcgtaggtctggaattacgccaactgccgtccgatgccgccgtcgactttatctccaaattaaaataatcgagggaatcatgaccactatacaaattatattgctgctggtgattgcagccattaccgggatgggtagcgtgctggatgaagggcaaacgcatcgtccacttgttgcctgtacgctggttggctgggtacttggcgatatgactaccggtatcattcttggcggtacgctggaaatgatggccctcgggtggatgaacgttgggctggcgatggcgccggataccgccatcgcctcggtgatatcgaccattctggtgattaatacaaatcaggggattggcgaaggcatcgcgattgccgtcgcgttagccgctgcgggtcaggcgctgacgatttttgtcagaacgatgacggtgttcttgatccaccgggcggatacctatgctgaaaagggcaatatgcgcggtatcgaaatcatgcatatcactgcgcttggtttccaggcgctgcgcgtgatgattcctacctttgtggtggtcatgatgagcgttgattcggtgcaggccatgttgaacggtattccgccagtggtgacgcatggtctgcaaattggcggcggtattattgttgttgtgggttatgccatggtcatcaatatgatgagcgtcaaatatcttatgccgttcttttttgccggtttcttgattgcggcttttaccagtttcaaccttgttggtttagggggaatgggattagtcggtgcgttgctgtatatacagctgagtccaaaataccagcctaaaaccctgaccgccgtggcggatggtgggccggcttctttaaataataacgacgatttggatgcataatgaagaacactatgatgacgagacacgccgccaatctgggtgaaaaaaaattaacccgcggtgatattattaacatgtttatccgttcaaatttcttgctcggttcatttaactttgaacgtgtacaggcgatgggctactgcttcatcatgatccccgccattaaacgcctgtatgggccgggcgcggaacgtaatgaagccttgaagcgtcaccttgaatggtttaacacgcagcctttctgtactgcgccgattctgggggtgacaggggcgatggaggaagagaaggccaacggcgcggatattgatggtagcagcatcagcggcgtaaaagtgggcctgatggggccgtttgctggcgtcggagatccgatcttttgggggacaattcgtccggttctcgcggcgctgggggcttccctggccctgggcggaaatgtgcttggcccgttgttcttctttttcgcttttaacgctattcgtctggcggtgaaatatttcggtttgaaatacggttatgaaaaagggcgtgagatattaaccgatctcggcggtaatcgaatccagaaactgaccgagtcagcgtcaatcctgggcctgtttattatgggagcgctggtttgtcgatggacaacgatcaatgtgccgattgtcgtctcccgcattaccggcgcggatgggcaggtcgtcgtgacaacggttcaggggatattggatcagctattgccgggtatgttaccgctgctgttgaccctgttcgtggcaaagctactccgtaagaaggtgaacccgctgctgatgattatcgtcatatttatcatcggcatttttggctactgggccgggttcctggcataaataataatgaggagatagtacaaattattaaaatattacatgttatggataacacattatatctcctcattaaacttgttctttacatatccagcatcggaacagaacggaagaatatataaggacagtatatgaaatatcatttttttcagaaaaatagactcagccttattactctggcaagtttagcgttactggcggggtgtgataattcggatgattatagcgagaatcatccctcacatcagcagtcatcgtatcttgagaaatatcgccctcagctacagtttactgcggctaaaaactggcaaaacgaccctaacggcatggtttattttgacggcgaatatcatcttttttatcaatataatccgaatggcaatagctggggagatctctcgtggggacatgccgtcagtcgggatctggtccattgggaggagcttcccgttgcgctgccggtggaaaaagatgccgatggtaacgtcacgcagatgtatttttccggcagcgcggtagttgatttcaataatagtagcggttttggtaaagcggatcggccggcaatggtggctatgtacaccagctattatccaaccgacatgacgctggataatggaaagactatcgcggcaggaacccaggcgcagtctattgcttatagcctggataaagggcgaacctggacgcagtatgaagataatccggtcatccctttaccgccagcgggctatgagagtcagtttaaggaatttcgcgatcctaaaatattctggtatgcgccggaaaacaaatggatcatggtggcggtcattgcgactcagcataaagcggtattttattcatcgaccgatttgcgtgattggaactttatgagcgaatttggtccggcgaatgccgttggtggcgtctgggaatgtcctgatttatttgaactgcctgttgacggtgacagtaataataaaaaatgggtaatggttataaatattaatcccggcgggcctgctggcggatcgggtaatcagtattttattggtcactttgatggtgaacgtttcacgcctgatgatgatagcgtgttcaacggcgaggcgcccgtcggttcactcattgccgatttcgaggaaagcgagagcgaatccggctggacggcgacaaaagatctgcagggggcttatctgtctaaaggcgaccgcgccgggcagtctggcgttagccagtatctgggagagcagctcgtcaataccttcgttaatggtgatgccagcgtcggcagcgtaacgtccccggcgtttaaaattaccgatcgctacatcaatctgctggtcggcggcggcaatcatccgcgtaacccggatgcggtcgaagacagcgttccgccttccggcgatctgctgtttgccggtgccgattttgagggggaagatggcgcaacttatgatgatattggttggacctcaagcggcgattttgttggccaggtcgttgccagcggcacgatagcgacgcagcagcaggtctccggttttatgggcaggaaactggtcaacagctattttggtgaattagtgggtaaagggggagatgcagtgacggggaccctgacttcagcgaacttcaccatcaataaaccctatatcaacttcctcgttggcggcggtaatcatccttatggcgcggaaggcgcggcggccgtcgtgctgttggtcgatgataaagtcgtcaggtcagcgaccggtagcgacagtgagtcgctgaactggacgcactgggatgtacaagagtatcagggtaagcccgcccggataatgatcgttgatgaaaataccggtggatatggccatattctggctgaccagtttatggccggggatgagccggcgcagccagtatcaacggagaccacggttaacctgctggtggatggcaaggtcgtttatagcgtaaccggggataattcggaaacgctgggctggcgttcctggaacgtggccgcactgaagggagagatggcgcaaatccgcattgtggacaatagcaccgccggttttggtcatgtgctggtcgatcacatcatacagtccgatcggcccaggcagattgcgaactggggggacttcgggtcggatttttacgcggcagtgacctggaatggcgcacctgatggtaaacgctattggcttggctggatgagcaactggaactacgcgggcagcattcctaccaccccgtggcggggcgggcagactctggttagagagttaagtttgcagacgattgataataagattcgcctggtacaaacgccggtggatgcgctgaaatcgctgcgtaataacgccttgtttaccctgtccgaggagaaggtggttgcccctggcgacacgctattagcggatagccaggttcagggccaggtgtatgaaatcgaggcggagctgcagccaggcagcgcgagcgaagcgggctttaaggttcgcacggggagccacggcgaggagacgctggtcggctatgatgccgcggccggcgaagtgtttatcgatcgtacaaaatcgggaacgaatgcgtttaattctggatttgcggcccgccatagcgctccgctgccgttgtcggataacgcctcggtagcgctgcgtattattgtcgatacttcatctgttaccgtcttctcagggaaaggcgaagtcgtgctgacggatcagattttcccggagccgaccagtcaaggcattgagatatacagtaaaggtggagatataaacgtaaaatcgttgactatctggcctctgaaatcaatctgggcagataaataaaatattaagcgagtatcgcgtaatactttaccgttggttcgtttttttaatcacgcaagcgcggtctggataatcgtaaaatattcaaccgtgcttgtgtgaaaccaattggtttattgtctgcgtatgccgcggttcatattgcggaagttatattaataaatattgtcctgatgagataacagagcaaggattagcattgtgatgtccaaaggcataaatgtcgcgttccataaaagttcttctgtaaataaacagaaagctgggtagggggggcgagatgcaattatctggcaggttgctggcatgcagagaagcggcttcgcggtttttgactccgcgttggatgatatggggattatcgctcttgatattaaatcagctcgctctgctgagctggcggagctggctggctgacgatatataccatgtggacctggcgaaagcgaaagccaattccgctccagcaaaaccagaccgcggaattgcggcggaaaacgatcgttttaccctctttgggacttcgtcgtccgcttcctccgcctcaggcccatcggtatccgacaatatcattcgtcatgcgccgccgtcgtcgctcaaactccgtttggccggggttgtggtgagctccgacccccaaaattcgatggcgattattgccaaagatagcaagcaattgacgctttttgtcggtgacagcctgccgggttattctgccaaaattatgtctattttttctgatcgcattgtgatttcttaccaggggcgctatgaatcgttattgtttaatgaacaatcggatgccggaagaagcatcaataaatcatcagtagcgcaaatcaagacccggttgcaaaaacacccgcaaaatattcttgattatatcaaggtgacacccgtcatggtggagaacaaacttgcaggctatcgccttaatgcaggtaagaatagggatttattttatcaatcaggtttgcaggacaacgatcttgctattgtgcttaatggtatggatttacgcgacactcaacaggctcagcaggcactgaaacagcttgctgaactcagtgagttgaatcttaccgttgagcgggacggtaagcgacagaatatttattttgtgcctggagatgattaattgttgaatataaaaataatcaaaagactctgtatcgttgtcttggtgtttttttcgctggtcattcggcagggcgcgggcgctgagttttctgccagctttaagggggtggatattcaggagtttattaataccgtcagcaagaacctgaataaaacgattattatcgatccggctgtacacggcacgattacggtgcgcagttacgataggctcaacgatgaacaatattaccagtttttcctgagcgtgctggatgtatacggctttgccgtggtggacatgaagaacggcgtgctgaaggtggtccgcgccaaagatgcaaaaaccgcggcggtacctctcgccagcgatgctcaaccgggaaagggagatgaagtcgtggcgcgcgttgtgcccgtcaataatgtgcctgcccgtgatttggtcccgttacttcgtcaattgaatgataacgccggggtgggcagcgttgtgcattatgagccttccaacgtcctgttgatgacgggacgggcgggagtgattaagcatttgatggaaatagttgagcgcgttgataaagcgggcgatcgcagcgtcgtcacgttaccgctggcctacgcgtccgctgccgacgttgtcaaaatggtgaccgaattaacccgggatgccggtaaatcagcgtcatcgggcttaatgatagcgaatgttgttgcggatgaacgtacgaattcggtattgattagcggcgaaccgaattctcgtcaattaattatcgcgatagttaagcagctggatcgcgaacaatttgttcagggcaacaccagggttatttatctgaagtatgccaaagcgaccgatttggtcgaggtcttaacggggatcggcgacactattcagggcgagcaaaagagtgctaaaccggccatcgcattacgcaaagacattactatcaaagcgcatgagcaaaccaactcgctgatcctgacggcggccccggacgttatgcgggatttggagggggtgatagctcagttggatattcgtcgcgcccaggtcctggtcgaagcgattattgccgaagtacaggatgctgatggtctcaatctgggcattcagtgggccaataaaaatagcggcatgtcgcaatttaccaatacgggcctacctattacgaccgcaattgccggagccaatcaatataaaaaagagggcgcggtggatagctcgattgccagtacgctcaacggtcttaatggtattgcggcggggttttatcaagggaattgggcgatgttattgagcgcgctttccagtaatagcaagaatgatattttggcgacgccgagcatcgtgacgctggataatatggaggccatgttcaatgttggccaggaggtaccggtgctctccggctcgcaaacaacctctggcgataacgtcttcaataccgtggagcgcaaaacggtcggaattaagttgaaggtaaagccacagattaacgaaggggattctgttttactggaaatcgaacaggaggtttccagcgtggctgacgccgcctccagcagtagcgctgacctgggggcgaccttcaatactcgcacggttaataatgcggtgctggtgggaagtggcgaaacggtcgtcgtcggagggctgctggataaaagcgtgacggatagcgtggataaagtcccggtgctgggagatattccggttctgggttacctgtttcgctctaacagtaaaaaagtctccagacgtaatctgatgctctttattcgcccatcaattatccgcgatcgcgatcagtatcgtcatgcatccgctgataaatatcatgcttttaatcaggaacaagttcagcagcgtggtcatcaggataacccagcgacgttaaacaatgacgtattaaagctgcctccggatcaaaatggcgccaccttcctgaaggttcgcgcggcgattagcgcattttattcgcaggaggggtaatgaatatgtctgttgccgacgtgaataaaccgcatccgcagcttccctttgcctatgcgcatgctcaacgcattttactgcagtgggagaatactgaatgccgggtgctgcgcgtcgtggaaacgacagccgcagcgttgcttgaaacccgtagggttgccgggtgtgccctgaatattcgtacgctatcgaatgcggaatttgagaaacaactgattagtagttaccagcgagactcaaccgaaacgcggcgactgatggttgatatcggcaacgaagtggatttttataccctggcggaagagttacctgacagcgatgatttgctggatgccgatgatgatgctccgataatccgtctgattaatgccatgctgaccgaggcgattaaggataaagcgtcagatattcacatcgaaacctatgaacgtcatttgcaaattcgctttcgggtagatggcgtactgcgtgaaatattacgccctcagcgccgtctggcttctttattgatctctcgtattaaggttatggcgcggttggatatcgcggaaaagcgtattcctcaggatgggcgcatggcgttacgcattggcggccgggcgattgatgtgcgagtgtcgactttaccttctcattacggtgaacgaattgttctgcgtttgctggataaaagcagcgtgaatttggatctgtcgacgttaggcatgtcgttatcacaccagcagcagatcgatgaactgattcagcggccgcacggtattctcctcgtcaccggtccgacaggttcagggaagagcacgacgctttatgcggcgttgagtcgtctcaatgcgagtgaacgcaatattatgacgattgaagatcctattgagtatgagctcgaggggattggccagacgcaggtaaacgccaaagtggagatgacttttgcgcgcggtttacgcgccattctgcgtcaggaccctgatgtcgtactggttggggagatccgcgatagtgaaaccgcgcagattgcggttcaggcatccttgaccgggcatttggttctttcaacgctccataccaacagtgcgttgggggcattatcacgtctgcaagatatggggattgaaccttttttactgtctacgtcgttattggccgtattggcgcagaggctggtgcggactctttgccccgattgccgccagccctacttagtcgctcccgcgttggcccatcagatggggattgcgcccggagctcgcttatggcagccgaagggatgtccgcaatgcggctttactggctatcgtgggcgtaccgggatacatgaattactgctgattgacgataggatccgtaccgcaatccataagggccacggcgagttcgcgattgcccgcttactgcagcatgaatacaaaacgttacgctatgccgggctggaaaaagccctgtccggcgagacaagctgggaagaggtcatccgggtgactgaaaaccagtcgcaggaaaaggagtgaccgcgtgttattccattatcaggtgttagacgagcggggtaaaaagcggcgggggagcctggaggcagattccgctcgtcatgcgcgtcaacgcttacgagaacaagggctggttccgctggcgctggtcgaagggctgaatgaggcccggcggaataaacgcgggtggcgtatttcctggtcgcgtggaataagcagcgccgatctggcgctgctgactcgccagctggcgacgctggtcgccgccgctttacctctggaagatgcgctggatgcggtggcaaaacaaagtgaaaaaccgcgccagcgtagcctgatggccgccgtgcgtagcaaagttcttgaaggtcattcgctggcggaagcgatggcaggatatcctgccagttttgagcggttgtactgcgcgatggtggcggcgggtgaagcttctggtcacctggaccaggttctgaatcgactcgctgattacaccgaacagcgccagcaaatgcgagcgcgcatcatgcaggccatgatttatccctgcgtacttaccgttgtcgctattagcgtcgttgccacgcttctttctgccgtcgttcccagggtcgttgagcagtttattcatatgaagcaggcgctaccgctatcaacgcgagtgctcatggcgatgagcgacggggttcgcacttttggtcccgggatactgttgctgctgttcgccgggctggtgctgatacgtcgattgctacgtcatgaaggtcgacgtattgccgttcatcatcggctgctgcgcctgcccgttattgggcgcgttgcgcgcggcctgaataccgctcgttatgccagaacgctgagtattctgaacgccagttccgtgccgttgctgcaagcgatgcgtattagcggcgaggtgctcaccaacgaatatgcgcgtcaacagctgtcgttagcgacggaatcggtgcgcgagggggttagcctgcatcgcgcgctggaaatgaccgaactctttccccccatgatgcgccatatgatcgccagcggtgaacgtagtggggaactggacagcatgctggaacatgctgcggataaccaggaccgggaatttacgtctcacatgcaattagcgctggggctgtttgagcctctcttgatcgtcggtatggcggcaatagtgttatttatcgtcatcgccattctgcaaccgatcctgcaattaaataatttaatcagtatgtgaatctgatgggcaaatataaggagataaaaatgcggcggcagagtcagcgtggttttacgctgctggaaatcatggtggtcattgtcattatgggcattctggcaagtttagttgtacctaatctgatgggaaataaagataaagccgatcgtcaaaaagtcgtcagcgatattgtggcgttagagagcgcgctggatatgtataaattggataacagccgatatcccaccacggagcaggggctgcaggcgctaatcactaaaccgtcggtaccacccgaagcgcgttattatccccaggatggctatattcgccgtttgccccaggacccgtggggtggggattatcagctagtcagtccgggtcagcacggacagatagacatattctcctccgggcaagatggcgtgccgggtactgacgatgatatcggtaactggacgctgagtaagaaatagtgcgtcagcgtggttttaccgtgctggaaatgatgcttgttgtgctgctgatggggagtgcggccagtctggtcatcatgtcatttccggccatgcagcaggataccgcggagcggcagttgcaacgctttcaggcgcagctggagtttgccatggatagcggtatgcaaaacgatcggctactggggatccagattcgacccaatggctggcagtttcaggtactgcaaagccaggcggcggaaacgcgctcttcggtggcgcattcggatcgttggcagggctatgtctggcaaatatggcaaccgcgtcaggctgcgttaggcggccaggttccggataaccagccgctcacgctacgtctccctcctccgcaggagtggccgccaaccgcggaaccggcggcggaccccgatattttgctattgcctggcggggagattacgccctttacattaattttcggcgagaaagacgatcgctccgaagtctggctgcgggtagatgaaagcggcgcgatcgcgacatcggcaaaaggaggcgcgccatgaataaacaaaaagggatgacgctgctggaggttctggtggcgctggccattttttccctggccgggctgacactgctgcaaaccaccgcccagcaggccagaaacgctggcatgatgaaagagaaaatgctggcaagttggctggccgataaccaacaggtcagattacatctcaacaaactatggcccgaaaaaagcgcgacgggcgctttggtgacctatgccggagaagagtggtatctcagctggcagggggttgatacagagttcagccagctacgggcgctggatattgaagtgcggcgccataaacaagataccgcggcgatattttctttacgcagctacgtggtgcacgaatgagccgttgccgcgaacgaggttttacgctgctggaaatgctactcgcattagccatttttgcggcgttgagtctcagcgctttccagatattacagggggtgatgcgcaatgatgagatggcacagcgtcaggtgcagcggttaaccgagcttcagcgcgccttcgtttacctggagggcgactttggtcagatcattccgcgccctccgcgaggggatgaacgtctgttctacgctgctcgttatcagcgccaaagtgcggactggagcatctccttcatgcgtaacggttggcaaaacccgatgggaatattaccccgctccgagctgcagcgggtggggtatcgtctgcgccatcagcagctggagcggctgagctatgttcatacggatccgcaggctggggaagagccaatcgtgaaggttttgctgaaagacgtgagcgcttttcgtttgcgcttttttgccaacggtatgtggcgcgatagctggaacgacacaacgcgtttacccgagggaattgaagtgtcgttagtcgtggccgacgtgggtgaagtgagccgcttatttttcgtcacgaccggggagcaagcatgaagcggcggcaaagaggcgtggcgttgctggtggtattgctgattctggcgctcatggtgaccatgtcgacaacgatagccgagcgtaatggccgagcctggcagcggacgatggctcaagtggagcgtctgcgggcgaaatggtatgcccggtcggcggaatcattggccgcaaaaatattacagagagacgcatctggttcaccgaataaaatggatttagcccaaaagtgggcgcaggggcctcgccgttttaccattgatgatggcgaagtctccgggctgatcgttgatggacaggcctgttttaatctcaatgcgattaaccaggggggcgccggcgagggaaggcagtcgacgttaccttactccagacaggtttttagacagttacttatcaacctgggggagggggcattgcgtgcgacgcagataaccgcagccctgagcgactggatagacagcgataatgcgccgggaatcgaggggagtgaagatgcgcgcgacgggccgcaatcggcgccttatctacccgcgcatcaaccgatgcaggatatcagcgagctgcggaccgtttccggcgttgatgccgaactttatcgtcgccttttgccctatgtttgcgtactgcctgtccagacgctgtcgataaatatcaatacgttgagcgagtcgcaaagtcccttattcgcggcgctatttgtgggggaactggatcccgcgggggcgatgaagctgctacagcaacgtccgcacggcggctggaatagcacaacagcatttttggctcaggaggcgcttaaggacagggatacctctgcgatcaagtacgtattgaccgtaaagagcgatctgttttttgccgattttaatgtgcaggtgggggacattcactatagccagcgcagcctgttgagcaagtcgggtcatcgcttccaggtgatacgacgacagcctggattgagcatgctgagggagccttaatgaaaagcaaaaaatcgcgtctacaggcccggttgatactgcatttgcccggtgatgaaaaacagcccgtgcggtggtctttccgttcgccagacggggatgagcaaggcgaactggcggcgggggaaaacgatgagagattaacgcatcttttcgcgacttatccggcacatatcctggtccctgcgagtgagtttgttttccatcaagtgacgcttccgcctaacgccgggcgccagcgtctgcagctgctgtcgttcatgctcgaggagcagctggcaaccgaggttgatgggcttcattttgccattttacaccagcgcggcgaggtatgtgacgttgcggtagtcgacaaacacgatatgcgtcagtggatcagccgttgcgatcggctaggggtacgggtgctgacaatgcttccggatgtgcttgcgctgccgcgggtcgaccacggctggagcgcggtgaacgtcgatgatcggtggttatttcggcgagaggctcacgccgggatggcggtggaatcgtcctggctacccgagtttttggccatctggagtccgaaggtgattgagagctattcccaaccgcctgcgttaagccccccttattgtgaatggcgagcgcatacgccgcagaattttctgcaactggcggccgggggggaaccctatgatggcgccgatcttcgtcagggtgaatttgcccgcgtcgggactttgcgagcgggactacggccctggcggccggtgatgatgttattcatcggctatttactcttgtcgtgcgtgaatgccggtttatctcactatcagctgggacaacaggcagaccattggcggcaggaaagccgtcgggtctaccaggcgctgttcccggcggataaaaatgtgcttaaccctcgtacgcagctgcaaaagcatctacagcagctacggccggccgggcaggatggactggctgtacacatgcatcagttgcaacaactgatggcgaagcatccgcacatcgagttgcgggcgttgtcctatgatgccgggcgtaaaacgctgaaaattgatctctatgccgcatcttttctggtgttagagcagttccagagcggcgcggggcaacattatcgggtgcagccgggcgaggttaaacagaatccgcatggggtcgagagccggctgacgctggaaataaaagatgaatacatttaagcgctactggcaacagcttagcctacgggagcgtgccctggtattggggggcggaggcctggctgtcgcgtgtctgttttattacatcctgtggttaccgtggcggcagcaggcggcgcaatggcagcgcacgattgccgatgaaaagagcacgatagagcggatgttgcagctggcgccacgtatacgccaacaggatacacggccgctatccgcccgtgacgaaaatctcagcgtgtcggcggttgttacgcagagcgcggcagctcagggggtgagtatcacgcgtattcagccgcagggacaacagctggcaataacgctggagcccggcgactttaacggattcatgcattggctgattactctggagcaacagcatcgcatccatattacggccctggaggtggcagcgtaccgcgataaaccgggatgggtagcggtaaataaactgacgctggagcgtaaagatgagccttaaactcaagaagctggtgcttgtattggtctgttatctgctgctgctggcgggaaatgcccctgccggggtagtgcgcgtttttatgcccgccgatattaaggccggtcgcttttccgggtctttatggcaaggtcgcgtgtaccagctcacctggcgcaacgttacgattgaagacgtccattggcagctcactttctcctcctggcggcctgcaataaaagtcgcgttgcgggatccccggggcttgcagggaaccggaactttacgcggttggcacgatcttgaatggtatgagtggcaactttccgcgcctgccgattttgtccgccagcagctgtcgctggcgttagcgatgaccctcaaaggggggctgcagctgcaattgcaccagggggagtttacctcccatggctgccagcgtcttggcggcgtcatcaagtggcggcaggctcagatggcgacgcctctgggcgatttggatctcaccgatgttgacggagagttgagctgcaacggaaaaggggaactggcgttggtcctgaaacaggactctcctcatctgaacatcgagggaaggggagtcgtgggggctggcggcggctatcgatttaacggactggtgcggagcggaccgatgctgcctgaggtcatgaaaccattgatagcgcaggttggccgggctaacgagcagggccagatagcctggcaaacgcaggggcaattattttgatccgtgatgtccccctccgacaggaaaaagagggagatgctggacccgcagagggcgctttatgacattattagtggctttttcatccacgtatcccatcatttggtggtttggtcttggggcgacaggcgctatcgtcgggagttttctgaatgtggtgatctgccgcttacccgtaatgctcgagaaacactggcagcgtgaggcgttgctgcagctgtcactgccttcacctgaacccacggcgcgctttaatctggtattgccgcactctcgttgcccatattgtcatactcctgttgccgcaagggataatatacctctgctgagtttcctgttgttaaagggcaaggctcgctgttgcggcgcgcctatttccgcgcagtatccgctggttgaggcggccaccgctgcgctgtttgtcttaaccgcacgtgtatttccgccggggctggcgctgtgtggcgcctgggtattcgtctcttttttattgatcctggccgttattgattatcaccgacagctgctacccgatgtcctgacgctgcccttattgtggatcggcttactgtttaatcttcagtcgtattttgtttcgttgccgcaggcgacgattggcgcagtggcaggatatctctgcttgtggtgcctgttctggctgttcaagctactgacaggcaaggatgcgctgggctatggcgattttaagctactggccgcgttgggagcctggctaggctggcaagcattaccccatgtggttttactggcggcgttaagcggattgctgtttgcgttcgtacagcgaggaggggcaaaaaaagatctcaatcagccgctggcattcggcccgtggctggcgttagccggtgtggcaaatatgctgctatttcagggtatttgaccgagagacggttgatgttcgcgcccggaaggcgggtcaacggcgatatccttcctgcggagcgctaacggcagaaaaagaggggggaaagagagggggaagaaagccccgggcgaggcgcagctgcgccatgacccgggcgttcccggctgaagggaattaaatctcggtaatggtcgtcgcctgcggcaggcgtgatttcggcagcgtcgcgttgaagtcttcgacgctatgatggccgaccggcaccaccaccaggctggtgtagccctgggctttcaggtcgaattcggcatcgagaatcgcgaaatcgacgccttcaatcggcacggcgtccaggcccattgccgccacgcccagcaggaagttgccgacgttgagataaacctgcttcgccatccactgatcgtcgtcgtgcagctctttgcggtgcatatcggcaaagaaggtgcggcctttatggttcgcggctttggcgtcggcgtttgcgaagcggccatcggcctcttcctggttcaccacgcgctcaagccaggcgtcgtccattgcggttttggcgcagaacaccaccacgtgggaggcatcgagaattttacgttcgttaaacacgtaggtgccgctcgccgctttggcaacgcgcgctttgccttcatcgctgctggcaacgataaagtgccacggctgggagttggtgcttgacgggctgtactgcagcagcgttttcaggttttccgcctgctcggcagttagctttttggtggcgtcaaatgccttggtggagtagcgctttaaggcaaccgatacgatatccatactcttcctcactgtttacaaccccttgcgggtgcgtttcgtgaaggaagagtacagcgatggcgggcaaatgataaggggcaaaaatgcgataacacttatcgcgcagcgctgaaaatcaccccggacgtaggcgctgctgctcttttttgctgagtttatcgacgatcagattccacgaatcatcgatcagctccgccagcagatccacgctgatgtcctcgccgggaactacggtgatccagtgctttttgttcatgtgatagccgggctcgatgctgcggtaaatcgcctgatgaagcagcgatttttgcggatcgcacttcaggttgaccagcgcgcggccgcgtaccgtcgcggtgagcataaaaatcttcccgccgactttaaacacatcgtactccgggccaaacggccagcagtgctcggtaaaggggagctccagcgcgatacgatgcgcgttgtcatgcagcgagcggtgatccatcagctattgtcctcggcaagggcctgccacatggcttcaaagcccagctcgacaaaacggacggcgcgctccggctcgtggctggcgtattcaatggtggtttcggccagcgaaagaaacaacgcatcgccgaaggtacggtactcgtcggattgaaaaacgggtttgattgagcgctggcacagttcattgagctcgggaaacatctcctggacgcggttgcgggtttcgtcggtgatccgttcactcagcgccatccggcgaatcgctttatgctccatggggttacgtacgccccagccgatatagctattccagatattgcgcgtgttctcttttggccgggtttcgttcgggttgagacccgctatcattgtctgaaccaggtctgcttttatggtcagataaagctcgttgagcaaatcgtccttggtggcaaagtagcgaaacagcgtaccctcggcaacccctgcgctgcgggcgatggcggaggttgaggcggcgattcccgattgggcaaaggcggcggttgctgcctccagtaacgcttgctttttatcttcactcttaggacgagccactacactttacctcactcataataaaaccacgatctaagcacgcccggcatgggcgctgcaacgctgtctgtcaaaatttgaaaatcgtcttgacgactttcagcttcttcctaataatgagtgcttactcactcataatcaagccttataacaaaaacctccaggaagggggatttcgccaggtcaggatatgaaccgtgtcactttcagcgtggtcgccatcatgttattagcgtcagcaacaactttgccgtttgtgttaaatgccggatttggtcaggcgccgcagggcgcgcagctcagcctggtggagcagtcgccgcactatcacgacggtcagtttcacaatcagcttccgacgccggggtttaccgggcaaaaaaatatgctggccgcatggtgggagtttctggtcgccaaacgtgaaaatgccagaccggcgcagccgctgccgctggtgaacaccgatctggccagcctgccgtcagggcaggacgtgatggtctggctcggtcactcctcctggtacctgcagctggcgggcaaacgcatcctgatcgatcccgtatttagcaactatgccgcaccgttttcgtttattaataaggcctttgccggggattacccgtggcacgctgagggcatgccggatatcgacctgctgattatctcgcacgatcattacgaccacctcgattacgccaccatcaaagctctgatgccgaaggtcaagcgcgtggtgacgccgctgggcgtggggtcgcacctgcgctactggggaatggagagcgcgatcatcagcgaggcggactggaatcagtcgctgcaggtgagcgatgagctgacggtacacgtcctgcccgcgcgccacttttccggccgcggcctcaagcgcaaccagaccctgtgggccagctttatgttcgttaccccgcagcagaaaatttactacagcggcgacagcggctacggcccgcactttaaagccatcggcgaacagtttggcgaagtggatttggcgatcatggaaaacggtcagtatgaccaggactggaagtacatccacatgatgccggaagagacggcgcaagccgctgacgatgttcatgcacgcgcggtactgccgggtcacgccgggcgcttcgtgctggcaaaacacacatgggacgatccgtacaaaaggctggcggaggccagcacagggcgaccgtggcgactgctgacgccaatgttgggtgagccggtttgggtcgctgataaaacgcaatcatttaacgcctggtggcgctaacgatgagagtggttcaggaggagagaggacatatgactatttccgctcaggtcattgatactatcgtcgagtggattgatgataatttgcatcagccgctacgtattgacgatattgcgcgccacgccggttattcgaagtggcatttgcaacgactgtttttacagtataaaggggagagtcttgggcgctatatccgcgagcgtaagctgctgctggcggcccgcgatctgcgcgataccgatcagcgggtctacgatatttgcctgaaatacggttttgactcgcagcaaacctttacccgcatcttcacccgcacgtttaatcagccgccgggtgcctaccgtaaagaaaatcacagccgcgcgcactgaaaagcgcccgccgggggaagaccggcggacgcttttttaccaggcgtagttgaccgtcgccgtcaccgtccgaccaatgccgtagaagcaggcgctatcgctggcgcaggaggccacgtatttggtattggcgaggttgttgacgttgaactgcactttcgcccctttcaggctcgaattcagctcgcctaactcatagctgaccatagcgtcgtacagatccactgccggtactttaaacgtgtttttcgcatcgccgtagctggtgccgatatagcgtacgccaacgcccgcggtcaggctttttaacgcgccgtccggcagggtatagctggtgaacgccgaagccatatgggtcggaatgcgtgccggcgttttcccttcggtaccgacgacggtggtattgacggtttccgcgtcggtataggtgtaagacgcgatcagattgaggttatcgaagaccgtcgcgtgcgcttcggcttcaacgcctttcgagcgcactttaccgctgttttcaaaccacccggccgcgctgttgtaggtcgcgacgttgctctgcgtcagatcgtacagcgcgagggtcattaacgcgtttgggtcaggctggtatttcagacccacctctacctgtttgccttcgctgggatcgaatggtccgacgcccggcgcgcggttggtctgtaggttaggttcgaaggaggtgctgtagctgatatagggggaaagaccggaatcaaaggcgtacagcaggccggtgcgccaggtgagcttattatcattctgctgggtgctgctggcgtcggtaaaatcggtggtgcgtacttccgcccagtcgtagcgcccggaaactaacagttcccagtttcgccagctcagctgatcctgaatatacaccccaacctggtcgagattttgctgttcattagtggcgggactgaagacgctttcatcgacgctaaccccgtaggtcgggctgcgccagtcgatatcgtactgcgagccgccggcccgaccaaggtactgcttatccttactggttttgtaatccacaccgccaatcaccgtatgcgccacctgaccgctggcgaactgcgcttcaagctggttatcgatgccaaactcatcggtctgacgctgttcatgctgggcgcggcgggagagtaccgagctgttggcggcgctggtggaataaaccaggtagcgatacttctgtttgatggtggcgtagcgggcgttctggcgcagagtaaaggtatcgttgagctggtgatcaaattcatagccaatcatcgtttgttcacgccacgactggttgtagctgggatcgctgacgttaaaatcgcgaggaatatagctgccgtcgacgctttccacggtgccgtaacgcggcaggaagttacggtagccggcgtccgggtctttctgatagctggttaacagggtaaagcgcgtggcgtcatcaggataccaggtgagggcgggggcgatagccatccgcgtctctttatagtcatcgatctggttattctgggtgcgggcgatcccgttcaggcgatagagcaggtggccgtcatcgctcagcgggccgccaacgtcgaaagccccttcggcgagctggttattgccggtacggaactgtacctcatgaattggctggctggtcgggcgtttgctggtcatgctaatcagcccgccggggttgacctgaccaaacagcaccgaggccgggccgcgcaccagctcgacgcgttccagcagccacgggtcgaaagtgccggtttgtgacgaggcggtggcaccgtagctcaggccatcgaggaatttgggcacgtagctgaagccgcgcacgaatacttcgtcgttgcggttagatgaacctcggtattcggtaaaaacgcccgcgctatagcgcagcgcctgggaaaccgaggtgacgtccagcgcccgcatttgatcgcgggtgaccaccgataccgactgcggcgttttgacgatctccgcagcggtctttgttgccgacagggtttttgtcgccactattcccttcagcggcgctgtaggatcctcgccgctgccggcggtgacgacgatcgtttcctccgctgccagcgccggcccgccaaacagagatgccgccacgcccgcggcccagaaagctgttatcttattatatttaaacatgtttattttttatccttggttgaatcgccatcaaaaaacgcccgagtcgaggggaatcgaccggcggttatcattaacggtgttaatgttattgcaaatagttattatttgcattagcgttattaacaaattcttacaaggaactattggctaatgaagacggcgtggagcggcctgctgattggcatgagtaccctaccggcggcggcgatgaactgcgaatctccttcgttacagggggaactggaggggaagttcgacgccagcggcgaggtctgttttgacctgccgacattgggcgagaactacgtcgcggcgaccctctccggcgtcaccgatgcccgactgctggatgacaataaccgccgtctgcgcacgctgctgacgggcggtccggcggacggcgagcaaaccctgctgttttctctgccggtaaatcgcgcctcctcgctggtgctgcacggcgaagagggggcgcgctggcgctttcagtggcagatgcgggaaaccaccgctctggccaaagttcagccgctggatccggtcagcccgcgcctgctgcggctgaagcgtgaactggcggcgggaggttcaacggcgcatttctggcaggagcgcgagcgggaagggacgccaatggtggaaccggtggacgccggccataagcgggtaactttcctgtggcgcggggcgagccgcaacgtgtttattctgggttcgccggcgggggatcacgatccgctgtttcgcctcggggattctgacgtctggtttcgcagctacgtggtgcccgccgataccctcatgcagtataagctggccccggacgtgccgcaggtaaccggcagcgcgcgggagcagcggcgggcgattctggtcagcgcccaggctgacccgctcaacccgaacagcatcaatgccgcccacgaccgctggaatcgccactctctgctggccctcaacgccgcgcgtttttgcaccgcccagcgtatggcgcagccgctacgctacggaaccttaacccgccatcagctgcgcagcgactttctgcaaaatacgcgggaagtgctgatttatcgcccgcggttgccgcagcccgcgcgctggaccctgttgctctttgacggtaaaacttaccagcacgaataccgcctcgccaacgtgctgaacgccctgatcgccagtcaccggctgccgccgattaacgtggtgtttatcgatagtctcgatcattcgcgacgggcgaaggagctgccgccaaatccgcactttgccgattttatggcccatgagttgctgccctggctgaaccgccaggggatcagcctgacccggcaaaaaaccgtggttgccgggtccagctacggcgggctggccgcgtcctgggtagcgctgcgctacccccggcagtttggcaacgtattgagcctgtccgggtcatactggtgggcgccgcaaggggaggaggccggctggctgacccgccagtaccagcagtcgccgcgctatccggtgcgcttctggctgcaggcggggaaattcgaaaccagcgggccggacggcggcatttatgccaatacgcttgaatttgagcgggtgctaaaagagaagggttatacggtgagctttcatccctcctccagcggccacgattacgccgcctggtgcgaagcgctggtcaacggcatgcgcgacctgaccggcttagcgctcaagggaaaaccagcgacgccagacccagcgcagcagcagatactctatggcgcccagcgctaaaaaccacaggcaaaagatcagggtataaagctggttgagatccatcagatggaatgtcgcaaccagcttctgcgccagcgtcaggcccagcgagggcgccggcagcagcaggcaggagagtaaagccagcagcaaaatgccggcggcgctgaggagcgtttctagcggatgtttcattatttgttaatcatcagttaaaaacatattgtccggtaaaaagagaatcaatgcaatatcgtttcgtacgtaattataatacgcattagatattatatttaaacgtcctcgtttattcccatgttaattattttggtaatatttgtgattaagttaattacattgcaatgtaaattaacgtcattattaagccagcgcttttacaaaagtataggtgctatatcctacaagtgtagcgataataatggccagcaggatgtacagcaccagacggcgtccgcgatagattccaaacatagtagacctcgtttagttttggtttattaatattctgcaatagttgttttatagaattaacttaccataaattttgtattggcgagagagtaaatattgcgcaagctcaaattatctcccgcctgtttgaaatttttctcattggcccggaatgattccaggctttccgcctcacggaattttaagggagatatattttgaccaaaacgatcaaaactaataataccaccccctcaggggatgtcgcgccacgccgcgcatatcagcagacggttgatgcggtgctggcgcagaataaaagccatgccaacggcctaagcgccgccgaggccgccgagcgtttgaagaccttcggccccaacgccttgccggagaaaaaaggcaagccggcctggctgcgcttccttgcccactttaacgacgtcctgatttttgtcctgctggccgccgccgcgctcaccgcggtcatgggccactgggtcgatacgctcgtcatcctgggcgtcacggtgatcaacgccctgatcggccatatccaggagagcaacgccgaaaaatcgctgcagggcatccgcaatatgctctccagcgacgcgcgcgtgcagcgcagcggcaagcatgaaaccatcccgacccgcgacctggtgccgggcgatatcgtgatactgcgcgcgggtgaccgcgtacctgccgatatgcgcctgattgagagccataatctgcgggtcgaagaggcgattctcaccggcgagtcgacggtggtggataaaaccaccgacgcgctggaaggcgaactgccgctgggcgaccgtaccaatatgctcttctcaggcaccaccatcagcgccggcggcggcgttggcgtggtgaccgcaaccggtcaggagaccgaactcggccacatcaaccagatgatggcggggattgagaagcaccgcacgccgctgctggtgcagatggataagctcggtaaagcgattttcgttatcatcctggcgatgatggccgcgctgttcgtcttcagcctcgcgctgcgcgacattcctctcggcgagctgctgctctccctgattagcctggcggtggccgccgtgccggaaggcttaccggcgattatctcgattattctctctctgggcgtacaggcgatggcgcgtcagcgggcgattatccgcaagctgccgacggtggaaaccctgggcgccatgaccgtggtgtgctcggataaaaccggcaccctgacgatgaacgagatgaccgtcaaagcgatcatcaccgccgactgctgctaccgcgtcgaaggcgacagctacgagcctcagggtaacatctgcctggaaggcagcaacgagccggtgcagattaaaccgggcagcgtgctggaaacctatctgcgcaccatcgatctgtgtaacgacagccagatgattcaggacgagcgcggcctgtggggcattaccggcgggccgaccgaaggggcgctgaaggtgctggcggcgaaagcgcagcttgcgcccgtcgacgcgcgcctggtggcgaagataccgttcgactcgcagtacaagtacatggcgacccaccagaaaatgggcgacgtcgagcaggtgctgattaccggcgcgccggacgtgatttttgccctgtgccgccatcagctgagcaagcagggggcggtgccgttcgagccgcagtactgggaagaggagatggcgcgctttgcccgccagggcctgcgtatggtcgccgccgcctacaaaccggccaccgttggcagcaccacgctgacccacgacgatctgcgcgaaggtctggtcttcctcggcattgccggaatgatggacccgccgcgtccggaagcgattgacgctatccacgcctgccagaacgcggggatccgcgtgaagatgattaccggcgaccacccgcagacggcgatgagcattggccagatgctggggatcaccaacagcagccaggcgatgaccggctatcagctggagcacatggacgacgccgagctggcgaaagccgccgttgagtacgatatctttgcccgtaccagcccggagcacaagctgcgcctggtaaaagcgctgcaggataacggcgaagtagttggcatgaccggcgacggcgtcaacgacgccccggcgctgcgccaggccgacgtcgggatcgccatggggattaaaggcaccgaggtgaccaaagaggccgccgacatggtcctgaccgacgacaactttgccaccatcgccagttcggtcaaagaggggcgtcgggtctacgacaacctgaagaagaccattctgttcatcatgccgaccaacctggcgcaggggctgctgattatcatcgccctgctggcggggaacatcattccgctgacgccggtgctgattctgtggatgaacatggccacctccgcgacgctctccttcggcctcgcgtttgaagccgccgagcgcaacgccatgaaccggccgccgcgtaaaaccggccagcacgttatggacgccttcgccgtctggcgcgtcgctttcgtcggcaccatgatcgccgtcgccgcctttatgcttgaagcctggctggcgccgcgcggccacagtccggagtttatccgcaccgtcctgctgcagatgctggtcaccgcacagtgggtttatatgattaactgccgcagcagcgacagcttctcgctgagcatgggactgctgcgcaacaaaggcatctggctggtgagcggcgtgctgctgctgatgcagctggtcatcatctacgtaccggtgatgcagacgatgtttggcaccgaagggctgccgctgcgctactggttcatcacgctggtcatcggtatcgcgatgttcctggtggtggaagttgagaagcgcctgacccgtcgtttccgcaaagccgcatagcgtgtctgacccgcccggcgtcccttctcctgaggggggagggacgccgcatcgtcgtaaggaattccccatgaacaagattatccgctccgccctgctggcctgcggcctggcaggctacgcgcttattgccgccgccgcgccggctattccggtgcgcgtcgccaccgtggaaaacgcgccgcatgccgatgaacggcaaatctccggccgagttgaggccattcacgccgtcgatattcgcgcccgcaccgaaggaaagattgtgcagcgccacttccaggatgggcagtacgtcaaccagggcgatccgctgtttacgctggatgacgcccagccgaaagccgcgctggcgctcgcccaggctgaactgaaaagcgcgcaggcttcgctacgccaggcccagcagcagctgagccgctaccagcagctgaaaaataaccacgcaatcagccgcaacgacgtagacaccgcgcagatgcagcgcgatgtcgccgccgccgccgtcgagcaggcccgggcgcgcattgccgcccagcagattacgctcggctacacccgcattacctcgccggtcaccgggcgcgtcggccatagtccttttcacgtcggcggtctggtgaatcccgccagcggcgtgctggtcgatgtggtccagcttgatcccattcgcgtggcgttctcgctggatgaaaccgcctttttcgcgaaagcggggcagcacacggatatcgccgcgctaaagcaggcgtggctggcgcaggtggatgtcgatggacggcgtgaagtcggcgccctgacctccgtcgataaccgtattgatagccgcaccgccagcgtggcgctgcgcgctgagtttgccaacccgcagcaccgtctgctgccgggcggcaacgtcacggttttcttccggccgcagcagcttaaggagagcccgatcatcccggcctctgcgctacagcaggatgcgctgggcttttactgctgggtactgacggcggacaacaccgtgacgatgcgccgtttagcgcccgccggtcagcatggccaaagcttcgtggtggccgatggtctgaaagcgggggagcgcgtagtgacggaaggcgcccagcgcctgcgtgacggcgcggccgttcagctgctgagtgaataagggagaggcgatgctcacattttttatccgtcgcccgcgctttgcgatggtgattgcgctgctgatgacctttgtcggcgcggtctcgctgaagctgatcccggtcgagcagtatccgcagattacgccgccggtcatcaacgttagcgccagctggccgggcgccagcgcggcggacgtggcggaagccattgccgcgccgctggagacccagatcaacggcgtcgatcatatgctctatatggagtccaccagttccgatgaggggacctacagcctgagcctgacttttgccgccgggaccgatgccgatttagccgcgatcgatgtgcagaaccgcgtgtcgcaggcggtggcgcagctgcctgccgacgtgcagcagaacggcgtacaggtgcgcaagcgggcgacgaacctgctgatgggcgtgagtctctattcgccgctcggcacgctatcgccgctgtttgtcagcaactacgccagcactcaggtgcgcgaggcgctggcgcgtctacccggcgtcggggaagtacagatgttcggcgcgcgcgactacagcatgcgcatctggctgcggcccgaccgcatgaacgcgttgaatatcacaaccgacgatattgcccaggcgctgcgcgagcagaacgtgcagggcgcggcggggcaggtggggacgccgccggtatttaacggccagctgcagacgctgaccatcaacggtatcgggcgactcagcgacgccgccggcttcgggcaaattgtggttcgcagcggcgaacgcggccagctggtgcgcctgtctgacgtggcgaccattgagctgggcgcgcgcagctacagctccggcgcgcagctgaacggtaaagattccgcctatctcggtatctatccgacgcccaccgccaacgctctgcaggtcgccaccgcggtgcgcgctgagctgacccggctgcacgcgcgtttcccggcggatctcacctgggaagtgaagtttgataccacccgctttgtggcggcgacgatcaaagagatcggcgtgtcgctggcgctgacccttatggcggtggtggtggtggtttcgctgttcctccagagctggcgggcaacgctgattgtcgcgctggcgatcccggtgtcgcttatcggcacctttgccgtgctttatgcgctgggctacagcgccaataccctgagcctgttcgcgattattctcgccctgacgatggtggtggatgacgccatcgtggtggtggagagcgtggaaacgaaaatggcggaggggctggatcgcggcgccgcgaccgccgaggcgctgcggcaaatcgccgggccggtgatcgccacaactctggtgctgctggcggtgtttgtgccggtagcgatgctgccggggatcgtcggcgagctgtatcgccagtttgcggtgaccttatcgacggcggtgacgctgtcgagcgtggtggcgctgaccctgacgcccgcgctgtgcgcgctgctgctgcgtccgcggccgcagcagccagccgccatctggcgcggttttaaccgcggtctggatacggtgcgcgatggttacgggcgtctggtcgggaggatgaatcgtcgcccctggctggcgctggcggcgacgatggcggcggccggagtggtggtgtttagctttaccactatgccaaagggttttctgccgcaggaagatcagggctacttctttgccagcgtgcagctgcctgaagctgcctcgctggagcgtaccgaagcggtgatggcccaggcgcgcgagctgctgttgttgaatccggcggttgaggatgtgattcaggtctccggttttaatattctcaacggtaccagcgcttcaaacggcggatttatctcggtgatgctgaaggactggcaccagcggccgccgctggaggcggtgatggaaaaggtgcagggccagctgatggggctaccggaggcgacgatcatgacttttgcgccgccgacgctgccggggctgggcaacgcctccgggtttaatttacgcattctggcccaggccggacaatcgccggcggagctggagcaggtgacgcatcaggtgctgcggacggctaaccagtacccgcagctgagccgggtatttaccacctggagcagcaacgtgccgcagctgacgctcaccgtcgatcgcgaccaggcggcccgcctgaacgtaccggtggcgaggattttcagcagcctgcaaaccgcgtttggcggcacccgcgccggcgatttcagcatcaacaatcgtgtctaccacgtggtgatgcaaaacgagatgcagtggcgcgagcgggcagagcagataagcgagctgtacgtgcgcagcgacagcggcgagcgggttcgcctgagtaacctggtgacgattacgccgacggtgggcgcgccgtttattcagcagtataaccagttcccgtcggtatcggtgagcgggtcggcggccgaaggcgtcagcagccggacggcaatggcggtgatggagcagattttacaagcgaacctgccgcacggttatgattacgcctggagcggcatctcctggcaggagcagcagaccggtaaccaggcggtgtggatcgtgctggcggcggtagcgatggcgtggctgttcctcgtcgcccagtatgagagctggacgctgccagcgagcgtgatgctgtcggtgctgttcgccatcggcgggtcgctgctgtggctctggtgggccggttatgccaacgatgtgtacgtacagataggcctggtgctactgatcgcgctggcggcgaaaaacgcgattttgatcgtcgagtttgcccgggcgaagcgcgaagagggaatgtcgatcgtcgatgccgcccgcgaaggggcgacccgccgcttccgcgcggtaatgatgacggcggtctcttttatcatcgggattgtgccgatgatgcttgccaccggcgccggggcgcagagccggcggattatcggtaccacggtgttcagcggcatgctggtggcgacggtaatcggcattttatttattccttcgctatacgtgctgttccagcggctgcgcgagtgggcccaccgccggatgtaggtggcccgcgcctgtccgggctacagtactgcatattgccgataacccgtagcccgggtaaggcgtttacgccgcaacccggggaatatgccgcgacgtggtattgctgtggcttcttcccggcttgcgctgcgcttagccgggctaccgggccgcagattgccggtaatccgtagccaggacaggcgcggcagcgccgcctccgggagattttcatgccgctgcggatatgtttctgaaacaacgtgtcatgcagcaatgccctggcccccgctgaaatcggcgaaccggaggaccgaagacaagggctggccgccagggatggcggacagaggcgaatcgagacagtgatgtcgagttgagccgaccgcaggctgaggtccgggaggtgagcgcagtgcgcagcaccgatttctttgcgggaccgcggggattgtaaagggggagacggttttctccccttttacccgttcacgtgcctcgatgagacattttctgcgacttgatggtgaacggaacccctcaacaccgtcccggaggcggcgctgcccaatctccctccctcaggcaccgggcccggaaatcccgggtcgcggcgtaaacgccttacccgggctactccccgcagacgatgttatgaaaactatctgctctccaccgcgatcatggtgacgaacggatggtactgccacggcacgctgccgcctttctggtacatcttcgaaatggtaccgtcgagatagagcatctggcgcacgttgagcctggactgcgcgtagcaggcaaaatcatagaaattggtttcgcgcgcgctgagcataaagaccactttgccatcgccggtgatgcccacgccgttacgcagcttgcgcgagctggcggacggcttcaaccgccagttgatcttgccgttttcaatcagcatcggcccggactgcacggcgtagcggatggccggcgacggcctgaatttatcgatgctgacaatccccgcgttttgcccgcgcagataaaacaccccgccgggacgaataaaaaagttgccgccgccggaagcgcggttaagcggggtcagctgcctgcctttctcgatatacagccccagcggcgcgtaggctttatcataaattccaccgttcatcgccatctgcacctgtccgttgtggtcgatatccgccagcagggagcgcagcgatccccaggctttgccgtcctctttttgccagtacatcacgatgcgttcgcgctgcggatcaacggtatagctttgcagcgtcagcgacgggtcggtcagcgagcacttcccgctggcgaaagcgggcagggataacagcagcagcggcagaagagagaaaaagcgcacgacaggttccagacagacgacgaaagcgtgcagtatagcgttttatcgccgctacgccgtccagatttcgcagtgcttttgtaccagcccgatcaatgaaccgccgttggcgacgaactcgcgcatttgctgcggctcgctgcgatcctgcttcgcctggcgcacaatcgcctccagcgcgctgccggcattcagcttgtgggcgctgggggccagcctatccgccagctgtaaaatttcttcgcgcaatgttcgttgttcgccgccgttaacatcggtattgatcccatcgagcccgtagcgacaggcctgatagcggttgaaggggtagagcagataatcctcgggctgatgcttaaacggccgctccgtcagcagccagcaggcgatgatctgaataaacccggcgatattcaccgcctgagcaatcgtcagcggcgtatccatcacccggacttcgacggtaccaaagcgcgggctggggcggatatcccagtgcagatccttcatgctgtcgatcatgctggtatagctaagacggcgaaacagaccggtaaaagcctgccagttattcacccacggcatcgggccgttatcgggataggcggcaaaaaggttaagccgcgaacaggcaaagccgctatcggtcccgtcgagccagggcgatgccgcattcagcgcgataaaatgcggtacgaagcgcgacaggccgtgcagaagatagatggcatcatcgccgttttgacaccccacgtgcacgtgctggccgaagatcgtcgcctgcttcgccaggtaaccaaagtgctcgacggttttcaggtagcgcgggttatcgctgatctgctgacgctgccagctttgaaacggatgcgttccgccgccgcagatttgcacatgatggcgggcggcggcgcgcagcaccgcctgttgaatcgcgctcagctgcgcggtggcctggtggatatcgcggcagacgccggtggcgatttccagcatgctttcggtgatgtcatgtttggcctcgcccgctttcagcgtgccctggacctcatcaataagcgcagaagagtcctggctcagatcgaagcccggcgggttgacgacctggagctccagctcgatgccaagggtaaacggctcggagcggtgaaaatcaggtaacggcatggcgactccctctttctctttatcagaaagtatatacccgtcatacttcaagttgcaggtgtgttggctttcctcgctcaccccagtcaattactggagtaagctcctggggattccctgcgtcgccgccttcctgcaactcgaattatttagggtatagaagacaacgcctcaaactgatgatctgccggacattatgaatttaatttatagaaaataacgccacgtgattatccctttaaaaagaaagtaaggctggtgcaatcctgcaacagaattcccgccggtggtgcaaaaagataaggttattctattttttaaataaaatcatatagatgatataagtcattcttattttataagccatttcacgcttattccccgcgcgttcagaactggtatgtatcttgcctgttaaatagcgacttttatttaacagggacaatgtgatgctgaagaaaaaaatattttcgcgtaaatgccatctcgccgttgctgttagcggagcattggcgctgatcgcctctttgccggccaatgcctcaaccctgcggatcgccatgaccgccgccgatatccctttgaccctcggccagcccgatcagggctttgagggcaatcgcttcaccggcattccgctctacgacgccctcgttgaatgggatctctctcagggagaaaagcccagcggcctggtgccggggctggcgaccgagtggcacgttgacccgcaaaatcaaagccgctggattttcaccctgcgcccgggcgttaagtttcacgatggttcaacggtcaacgccgatgccatcgtctggaacgtggataaggtgctgaataaagccgcgccgcagtatgccccgggccagataggcaacaccctctcacgcatgccgaccctgaccggcgcggaaaagattgacgaccacaccgtggcgctgaccacctccgaaccggacgcgctgctgccgtacaaccttaccaacctgtttatcgtttcgccgacggcgtggcagaagctgtatgacgcggtgccggcaaacgccggcgatgccgccgcgcgtagtaagcaggcgtggaccgagttcgccgcccacgcggtgggcagcggtccgttcaaaatggaaaaactggttcctcgccagcagctgatcctcgataagaaccccgactactggaacaaagatcgcattccgcgagtggacaaagtggtgctgatcccgctgccggaagctaacgcccgcacggcggcgctgctctcgaagcaggtggactggatcgaagccccggccccggacgcggtcgatcagataaaagcccagggctttaaaatctacgccaacacccagccgcacctgtggccgtggcagttctccttcgaagagggctcgccgtggaaagatattcgcgtgcgcaaagccgccaacctgtgcctgaaccgcgcggagctcaaaagctatctcggcggctatatgaccgaagcgaccggcgtctacgaggccggcagcccgtggcacggtaaacccaccttccagatcaaatatgacccggataccgcccgtaagctgatgaccgaagccgggtatagcgccgggaaaccgctgcacgtcacggtcgccacctcggcctccggctccgggcagatgcagccgctgccgatgaatgagtacatccagcagagcctgaaaagctgcttctttaacgtcgacattaaggtcaacgaatggaacaccctgtttaccaactggcgtctcggggcgaaagatccgtcggcgaaagggatcgacgcgatcaacgtcagcgccgcggttaacgatccctatttcggcatgatccgcttctccaccgcgaaggccttcccgccggtggcgaccaactggggctacttctcgaccccggaaaccgaaaagctggcggcggcggtgaaacacgcgtttaccccggctgaaatggataaagccgcgggtgaactgcacgccgcgctggtcgatcaggtgccgttcctgttcgtcgcccacgatgtcggaccaagggcgatatcgccagccgtcaccggtgtggtacagccgcaaagctggtttatcgacctcagcctggtgagcaaaaaagagtaatcgacacgggagcaagagatgatcaatacgctgctatatcgcatcctgctggccatccccaccatgctcggggtcgcggtgatctgttttatgctggtgcagatagcgccgggcgacccgctggtatcggtgatgccgccggacgcttcggaatcgctgcgtcagaccttaatgcaggcctacggctttgataaaccgctgccgctgcagtttgtgcactggctatggcgggcgctgcacggcgatctgggcatgtcggtcgctaccgggcgcccggtcatcgatgaagtgatgacggcggtcgcctactctctgcgtctggcgctgctggcgacggcgatcgggtttgcgctgggcagtctgttcggttttgtcgccggctactttcgtaacagcattattgaccgtctggcctcggtgctatccgtgtttggcgtcagcgtaccgcactactggctggggatgctgctggtcatcgtttttagcgtcaaattcgcgctgctgccggcgaccggcggcgggccaatcggcgaggtgggctggcagtggaactgggaacacctgcagtttatgctgctgccggccttcacgctgtcggtgatcccgaccggcattatcgcccgcaccgttcgctcgcaggtggcggacattctcagccaggagtttatcgtcggcctgcgcgcccgggggctcaacgagtcgcggatctttctgcacgtggtgaaaaacgccgccccgaccgcgctggcggtgatggggctgcaggtcggctatctgatgggcggctcgattctggtggaaaccgtcttctcctggcccggcaccggtctgctgctcaacaccgctatcttccagcgcgatctgccgctattgcagggcaccatctgggtactggcgctgttctttgtcctgctcaatctgctggtggatattctgcaaaccagtctcgatccgcgaattaagaggagctgacgatggtggataccgtgacgaccaaaggcattaccgtctctgccgcgacggttgccagacaaggctactggcgcggcgtgtttcgccgtctgctgcgcgacccgggcggcgtattcgtcggcgcgatcattctcatcctgctggcgctggcgctgttcggtccctggctaatcgtgaaagatccgtatcaaacgtcgatgtttttacgcctcaaaccgattggcgccgacggctttccgctgggctccgatgagctcgggcgcgatatgctatcaaggctgattctcggcacccggctgtcgctgtttatggggattgtcccggtggtgttcgcctttttcatcggcggggcgatcggcatcatcgccggctatgcgggcggtaaaaccaacaccctgattatgcgcaccgtggacgtgttttacgcctttccctcggtgctgctggcgatcgcgctctccggcgcgctgggggcggggatcggtaacgcgctgctctcgctgaccctggtgttcgtgccgcaggtggcgcgtatcgccgaaagcgtcaccgcgcaggtgcggcatatggactatatcgacgccgcccgggccaccggggccagcgcgttcaccattattcgcgtccaggtgctgggcaacgtgctggggccgattttcgtcttctccaccggcctgatttcggtgtgcatgatcctcgcctccgggctctcttttctcggtctcggggttcgcccgccggagccggaatgggggctgatgctgaacaccctgcgtacggcgatttatacccagccgtgggtagcggcgctgcccggcctgatgatttttatcacctccatttcgttcaatatcctcgcggaccgcctgcgtgcggcaatggcgattaaggagtaagcgatgcaaccctttatcaatatcgacctcggcggaccggcgcagccgctgctgaaggtcaacaatctgctgaaacattttcccgccggcggcggcaaagcgcgcgaagtggtgcaggcggtggacgacgtcagtttttcggtgatcaaaggcgaaaccctcggcgtggtgggggagtcgggctgcggtaaatccaccaccgcgcggctgctgatgcagctgcttaagcaggacagcggggagctgatcttcgatggtctggaggtgggctcatcgcgcctgccgatgaaagcgtatcgccgccaggtgcagatggttttccaggatagctacgcctcgctcaacccgcgcatgaccatggaagagagcattgcgttcggccagcgggtacacggcgtcagcgccaaagaggccagcgagtacgcccgctatctgctggcgcacgtcggccttgagccggaacgttttgcccatcgttatccgcacgcgctttccggcggccagcgccagcgggtgaatatcgcccgcgcgctggcgatgaagccccgtctggtgatcctcgacgaggccgtctcggcgctggataagtcggtggaagctcaggtgctgcagctgctgcaggagctgaagcggacgctggcgctgacctatgtgtttatcagccacgatctgcacgtggtgcgctggctgtcggaccgcattctggtgatgtatctcggcgaggtggtggagattggcccggcggagcagctgtttaccgcctcggcccacccctatacccgggcgctgttaagctcgatgccgtcgatggacccgcacaatcgcaccttaacctcgccgctgagcggcgatccgcccagcccgatttctccgccctccggctgccgctttcatacccgctgcccgcacgccagagcggtgtgcgccgaggtgaaaccgacgctcgaaagcgtcggcgaggggcaccagagcgcctgcctgatggcgcagcccgcgtcgccctggcatcaaaatatcgccattcaggaggtcagccatgtcgcatgaagcctacgtccatatccgcgacctgcgggttgagtttcgccgcgacggtcagacggtcaacgcggtcaacggcgtctcctttgatgtgcaaaaaggcgaggtgatggcgctgatcggcgagtctggctccgggaaaagcgtcaccctgcgcgccctgatgcggctgcacccgccgaaaagcagcgtgctttccggtaccctgagggtcggggaagaggatgtgttgaacatgagcgccgggcagctgcggcgctaccgcggcgcgcgctgcgcgatgattttccaggagccgctgctggccttcgacccggtctataccgtgggccagcagattgtcgaggggctgcgtcgccatgaaggcctgtcgcggcaggcggcgcgggaaagggcgctggaggcgctgcgtcaggtgcgcattccgagccccgagcggcggctggatgcttacccgcacgagatgtccggcgggatgcgccagcgggcaatgattgccctcgcgctctcctgcaacccgcagctgctgctggcagatgagccgaccaccgccctcgatgccacggtgcaaatccagatcctgattctgctgcgcgagcagcaaaagcagcgcgatctgtcgattatatttgtgacccacgatatcggcgcggcggtggagatcgccgaccgggtggcggtgatgtacgccgggcgcatcgtggaggaggcgtcgatcgaggagattctgtatcgtccgcgccatccctatacccaggtgctgctgggcagccggccgaaagaggggttgaaaaagggcgatgcgctgcactgtatccccggctcaccgccggatctctcgcgcctgccgccgggctgcgcgtttgccgaacgctgtccacacgcgcgccccgcctgcgcgcaaagccagccgacgaccgaaccggccgggccgcgtcacgtggtaagttgccatcgctggcgtgagctgagcccgtccgttgaaaaccaggcgctttacgcctgaggccaggaggaaaccatcatgcaggacgacattcgcgcctttatgccctatccgccgcatccggtggcgcatgcgctcagcgggccgctgagcggcttaacctttgcggtcaaagatctgttcgacgtggcgggctaccccaccggcgggggcaatccgcacctgctggcgctgtccgggattaaaaaccgcaccgcgccggtggtgcaaaagctgttagataacggcgcgcgctttatcggcaaaacccataccagcgagctggcgtattcgatgagcgggcacaacgtgcattacggtaccccgcgcaacggcgccgcgccgaatcatatacccggcggatcgtcgtccggctcggcgtcggcggtatcgaacgcggcgtgcgactttgccctcggcagcgataccggcggctcggtacgcacgccggcgagctactgcggactgtttggcctgcgtccaacccacggccgtctctccctcgacggctgccagccgctgtgcgccaccatggacacctgcggcttctttgcccgctcgccggaggtcttttccgccgtcgccgcctgtctgttcgatgctgaacgcgcggatttcaacggcgtgcggctggcctgccacgatgggctgttttcccgcctgccgctgcgcagccagcaggcgctgctgccggtccgccaacggctggcgcgctttttcggcccgttagcgccgctcgacgcgccgctgcccgacgcggacgatatttatctcgccttccgccagattcagggctacgaagcgtggcaggcgcagggcgaaaccattgagcgctatggtctgcagctaggcccggacgtccgcgagcgctttttctggggcaaagcggtcacccgcgcgcagtttgacgccgcctgccagctgcgcgagcgttttaccgcctggtgggatgcgcagctgggcgatgcggtcctggtgatgccgaccgttcccgatggcgcgccgctgctgacggcgcaggccgaagagatagaagcggtccggcgcctgtctcacgacctgctgttaatttccgtgatgacccaacgtccgcaggtgacgctgccggtcgcccagacgggcggtctgccgctggggatgtcatttttaggcccgcgcggcagcgatcgtctgcttgtcgagctggccgccgcgtttatgcaaggagaccgaaatgagcagtgatgtcctttttaccccgatgaccgaaaccaccgactgccgggttaacggcgagcgtctgtgggagtcgctgatggcgctggcggaaatcggcgccacgccgaagggcggctgctgtcgtctgacgctcaccgatctcgatcgccaggggcgggatttggtgattagctgggcgcaggcggcggggatgcgcgtcaccgtcgataaaatcggcaacgtctttatgcgccgggaagggcgtaatccggcgctgccgccgattgtctccggcagccatattgatacccagcccaccggcggcaaatttgatggcaactacggcgtgctggcggcgctggaggtggtgcgcaccctgaacgatcggcatatcgaaaccgaagcgccgattgaagtggtgttctggaccaacgaagagggctcgcgctttgtgccggtgatgatgggctccggggtgtttgccggggtattcccgctagaaacagtctatgccgcgcaggatgcggacggtaaaaccgtgggcgaggagctggcgcgcatcggctatatcggcagccagacgccgggcgatcatccgattggcgcctactttgaagcgcatattgaacaggggccgattctggaggatgaagcgaaaattatcggtatcgtgcagggcgtgctggggatccgctggtatgactgcgtggtgaccggccaggagtcccacgccggaccgacgccgatgcgcctgcgtcaggatgcgctgcaggcggcgacccgcattatgcaggaggtcgtggcgatcgccgggcgcagcgacgaggggcgcggtacggtagggagggtgcaggtctatccgaacagccgcaacgtggtgccgggagaggtcactttttcgattgatatgcgtaatctcagcgatgcgctggtggatgagatggaccgccagctgcgggcgtttatcgccggggttgagcgggagagcggcctgaaggtggcgctgaaagaggtgagccactatccggcggcgccgttccacccggagtgccaggcggcaatcgccgacgccgcgcagcggctgggctatccggcgcgggagattgtctccggcgccgggcacgacgcggtgtatatgagctatctggcgccgaccgggatgatttttatcccctgcaaggacgggatcagccacaacgaaattgagtatgcgtcgccggagcacgttgaggccggtgcgaacgtgctgctgcaggtgatgctgcagtacgcgcgggtggtataaacggccgctctccccggtcgcgctgcgcttaccggggctacgggtttccagctgcctgcggggcagtagcccgggtaaggcgtttacgccgcgacccgggatttccaggtccggagcctgagggaggctgattgagtagcccggacaggcgcgtcaagcgccgcctccgggacggtgtggtaggggttccgttcaccgctatttcgcagaaaatgtctcaccgtggtaggtgaacgggtaaagggggagaaaaccgtctccccctttacaatccccgcggtcccgcaaagaaatcggtgctgcgcactgcgctcacctcccggacctcagcctgcggtcggctcaactcgacatcgctgtctcgattcgcctctgtccgccatccctggcggccagcccttgtcttcggccctccggttcgccgatttcagcgggggccagggcatcgctgcatctcacgttgtttcagagatatccccgctgctgtatgaaactctcccggaggcggcgcttgacgcgcctgtccgggctacaagagctacgggtttccagtcgtcagcggggagtagcccgggtaaggcgtttacgccgcgacccgggatttccgggctacaagggcaatacaggctagctgccaaatttgcgcgaaccgataacgcacagaatcacgcccagggttacggtcagcatcaggccgttctccccggtcgcgctgcgcttaccggggctacgggtttccagccgtctgcggggcggtagcccgggtaaggcgtttacgccgcgacccgggatttccgggctacaagggcaatacaggctagctgccaaatttgcgcgaaccgacaacgcacagaatcacgcccagcgtcacggccagcatcaatgggctgacggtttcgtgcaaaagcgccgccgccaggccaagcccgaagaacggctgtaatagctggagctggccgacggcggcgataccgccagcggcgagccctttgtaccagaaaataaagccgataagcatgctaaagagcgacacatagccgagcgcgatccaggcggaaggcgatatagcgccccatgacgctggccgggtcatccacgaggccaccagcataaaaggcagcgccataatcagcgcccagctaatcacctgccagccgccgagctcccgggtcagcttcgcgccctccgcatagccgaggccgcagacgatcaccgccgccagcatcagcagatcgccgctgagcgacgccgccgcgttttgcgtcagggcgaatcccaccaccagcaggctgccaataaccgaaaagatccagaaagcgcggcgcggacgttctccgccgcgcagtacgccaaaaatggccgtcatcagcggcaatagcccgataaaaacgatcgaatgcgctgacgtgacgtgccgcagggccagcgccgtgagcagcggaaagccgatcaccacccctgacgagacgatggccagcggcacaagctgctacgcgcgcggccgtttctggcgaaagcctgcccgtcccgctatcggccggagattgagcgcgctatacgggccaccacgtggaacaccccttcgctggtgagttcgctgatctgcacctggattgaagatggcacggtggcgcgttttgaagcgcagaaacgccaggatgcgcggcggcggcagggggttgcccgcgaggttctcggcgcgcttcccttcgtcagccatccgggttcgtattttgtctggctgcctctgggcgaggagagtcgggccgatcggctggcgaaaacgctgatggagcgccatatttccgtgtcgaccgccgagcctttttgcgttacagcgaacgttccgcaggcgctccgcatcgccctcggctccgttcccttcgatagcctgcgcgcggcgctgaaccaggttcgcgaagccgtggagtatgagcaatatcgctagcgtttcggcggcgagcgatagggtgacttattagtaacgttttatggggtagatagcgggttaatagtcttaaaataaatgttgtttttttattgttatgatttatagggttaattttaaatttaatgacaatataaaattgttacggtagtgtacaaaacacatcaagtacggttgtgctgttgacgctgagcgagcgcacgtcctgaagatacgacgttgttaatcatttcaggggcggagccgcgccctgttctgtacaggatactttttcaatgcagcagctctacctttatatactgattgccagcctgaccattgccagccccgggccaggagtgcttctgacgctgaccaacaccctgaattataatctgcgtaatgcaatggcggggattatcggcgtggcggtggggatgggcgtcatatcgattattgctgccagcagcgttggcgtgatgattaccacctctcagctgacgctgttgatagtcaagggggttggggcggcctatctgatctatctgggcgtaaagctctttcgctcggtgccccgcgcgctgaatcaacctctctcttccgccgattcaacgatgccttccgccagccagcggtttcgtcagggagtactggtgtcgttgtttaatcccaaacccattgtgttttttatggcgctgtttccccagtttattcatccgcagcagccctttattccgcagttcagcgtgctgtcgataaccttctgtattctggtggttgtcattcattcactctacggccttttcgcacacagcgtaaaaacgaaaatgtcgtccgggaatgcctttgttaagctgaataaaaccggtggcatcgtgtttgtgtgttttgccgtcggtcttattgtttccgccgttcatccttatttgtcgtcatgaccgtgagggcgcggggcccggcgttcagcccatctgcgccagctggccgcgcagtacctccacgccctgttcgatggcgtcagggtgaatggcgtggaaccccatccggaagaaattagccggcggcgcgtcgctgagaaaatgccgcgcgccgggctcaatcagtaccccggcgtgggcggcgcgccaggtcagctgctgggtgttaatttgctccggcgtggccagccagaacgcgttggcgtgttcgctgccggggatgatgcggcactccggcagatgctgctgtagcgcgttgttgagacggtcccagcgctgggcagagtcgtaatggtagcgccgcaggtgggtttcatagtggccctgggcgaggaaatgggccatctgatactgaatattggtcggcggatgacgatacaccagccgccgcagcgcccgggcttcgtcaatcagatccgggtcagcgaccataaagcccagccgcaggcccggcgatagcgcttttgacaggctgctcacgtagatcactcttccgcagcgatcgctggccttcagcgccggcagcgggttgagcataaagttactttcagagtcgtaatcgtcctcaataatcaccgcatcatggcgagcggcatgctccagcagctggtcgcgccgcgctttgctcatcgccaccccggttggcacctggtgtccgggagtgacgtagtagtaatcgcagggggcgtcgttgaggacgatcccctgttcatccaccggatgcggcacgatatcggtatcggcaagcagaaaggtgttaatggcctcgcgaaagcagggattctccacgccaacgcgcgtgctggatgacatcagcaggcgcgtcagcaggtacagcgcgttttgcgaaccgagggtaatcagaatctcgtccggcgaggcgacaatgccgcgtttgggcagcacccgggtgcggatctgctcaatcagcatcggcacgtcgcgatcgatgtgatccaccacccactccgggtcgcgaaccccgccgtgcagccagtttgccgccgagcgccaggtcgccagcgggaactggcgagtatccggctggccgtagataaacggatagcggtagttcatccagccggccggcttcagaatcgactcctgctggctgggggtgatttgcagccgcgtgccccagcgtggtgcagaaccctcgtcctgcggtgcagcttccggcgccgaagaggggctggcgtgctggtaatccggatgcaggtaataaccgctgcgcgggcggctcacgaggtatccctcgttaaccagaccctcaaaaaccagcgccgtggtgttgcgcgagacccgcagctggctggccagctggcggcaggaggggagcggcgtgtcggcggaaaaaatgccgcccagaatggcgttaatcagcgtctcgcgcacctgctcctgcaaaccgcggcgcgggtcgaaatcaacgtgtaacaggtgtcggatcatgcctggctccttactcaaacgctcagtacagacactggagcaaattccataccaccctgagaatgactgacacatccgcgcggtgaatctggctctatccggaaatttaaaacgctccctacagtaaaaacgtattcatcagtcgcggaccggaacttccgtcggcacatattttgcaaaaccttttcatgttctggagtgaacacgtctggcgaattaattaggggtgaattaatgaaaaaatcattaggttcaatttgtctgggcgccatcatggcgatggccttttcttatcacgcagccgccgcggatcttccggaaatagaaaaatccggcaccctgaaagtcgcaaccgaagatgattacgcgccttttaactttatgaataacggccaggcggatggcttcaacaaagatatgctcgatgaattacgcaaatacgcgaaattcaacgtcgaccagagcattttgccgtggaccggattactggcggcggtttctaccggccaatacgatatggccttaaccggcgcggtaattaccgacgaccgtctcaaggtctttgatttcacgccgccgtgggcgtcagcgcagcactattttgtcaaacgcgcgggcgataattcattgaacaccattgccgaactgagcgggaaaaaggtgggcgttcaggcgggcagcgcgctgctggcaaggctgccggaactgaaagcgatgctggagaaaaccggcggtaagctggggccggtggtggagtatccctcctacccggaagcctacgccgatctcgccaacaaacgcctggactacgtgattaacgtggttatctcggtcaacgacctggcgaaggccaagccgaaggtgttcgccaaaggtctggcggtatccggcccgggctatatggcctggccgatcccgaaaaactcgccgcagctgctggcctatatgaccaaatttatgaaccacatgaaggagaccggcaagctcgcggaactccagaaaaagtggtttggcgaaacctatgacgatcttccgaacgtgccaatcaccagcccggaacagttccataaattggccggtctgtaatgcgttctgcggcgggtaaccgccgcccgttgagtgaaggagggcttcatggatgcaatttcctggcagttactgattgaaggcgcatggacgaccctctggatttcggccatcgccattgcctttggggtggtgattggcctgctgattgcgctggtgcgcatgctgcgcattccggttatcgatcagctgctggtggtctatatcagcctcgcccgcgcgacgccgctggtcacgctggtgctgttcctgtttctttctctgccgaccgtcgggattaacctcgacaaaaacgtcgcggcgattgtggcgctgacgctcaatacctcggcctttaacgccgaaatatggcgcaacgcctttcgcacttttccccgcgaacagcgggaagcggcggagtcggtcgggatgcgccgctgggcctacttccgctacatcatgctgccgcagatgtggattgaaagcctgcccgcgctggttaacgagatgtcgttcctgattaagggcagtccggccattgcggtgattggcgtggtggatttgacgcgcgtcaccaaccggatttcttcggtcacctatgaaccgctttcgccgattctggcggcgggtctgctgtacgtggtgattattggcctgctgctgaaactgcagggaatggccgagcgtaaagcgaagcgtctggcacgataaatacgggaggtgctatgaatcagtgggccgttatctggtcggtgcgcgacagctttattgccggtttactcgccacccttgagctttttattaccgcggcaattgccggattaattatcggcattgtcctgtgctatttaaccgaatatcaaaagaaaacccttaaccggcttattattgcctttgtcagcttaatgcgggcgattccctttttgatcctcgcctatttgctctattacgggctgccgcaagtgggtattagtatggagccctggaccgccggtttaattgccttaattatctaccacggcgcctatttctttgagattttgcgcagccagcggcgggtattttccggtggctatatcgaggcggcggtcgcgcaggggttttcgcgctacaaaatattccgccgcattattctgcccaatattctctcttccgcgctcccgctgatggggaaccagctgattatctgcctgaaagataccgctttcctcagcattatcaccgtccaggagataaccgccgcggctaacagcgtgcaggccacctattttatcccgtttaacgcttttatcgtcgcgattgggctctactgggcgatcagcatcctgctggagctgctgattaaacgcctgagcgcctggggagtcagaagaggaatgagtcatgtctgatactactgctgtaagcgtcaaaaacgtctctaaacagtttgataacgtggaagttctgcgtgatatcaacctgacggtagaaaaggggaccgtggtgagcattctcggctcgtcggggtcgggtaaatcgacgctgctgcgctgcatgaactggctggaacagccggatcgcggcgagatccgcatcagcggccagcggctggggattgatgagcataatggccgcgcgatgtcccatcgccagctgtcgaaaatccgcgagcgggtaggcatggtgtttcagagctttaacctgtggccgcacctgacggtgcagcagaacgtcagcgaagcgctgctgcacgtgaaggggatgaagcgtgatgaagcgaaagctatcgccatgcagcagctggagaaagtggggatggcgcataaagccgacgtttacccgattacgctctccggcggacagaagcagcgggtggcgattgcccgttcgctggcgatgtcgccggaggtgattctgtttgatgagccgacgtcggcgctggaccccgagctggtcaacgaggtgctgggggtaatgaaggcgctggccgccgagggctacacgatggtggtggtgacccacgagatggactttgcgcgccaggtctcggatgaggtggtgtttcttgagaaggggttgttgattgagaaagcgccgccggagaagtttttcaccaacccggattccgagcgcgtcaggcagtttttgcagagcagccggtaagcatcagcggccgttctccccggtcgcgctgcgcttaccggggctacggggttccagccgtcagcggggagtagcccgggtaaggcgtttacgccgcgacccgggatttccgggctcggcgcctgagggtggcagattgggtagcccggacaggcgcgtcaagcgccgcccccgggacggtgtggtaggggttccgttcaccgctatttcgcagaaaatgtctcaccgtggtaggtgaacgggtaaagggggagaaaaccgtctccccctttacaatccccgcggtcccgcaaagaaatcggtgctgcgcactgcgctcacctcccggacctcagcctgcggtcggctcaactcgacatcactgtctcgattcgcctctgtccgccatccctggcggccagcccttgtcttcggtcctccggttcgccgatttcagcgggggccagggcatcgctgcataacacgttgtttcagagacatatccgtagctgcatgaaactctcccggaggcggcgcttgacgcgcctctccgctctatcaaaccttaatcccgatcgatggcgaacggctgccaggcctgacgcaccggcatcacctcgacccggttgatattcatatggtccggcagcgtggcgatgtagaacatctgttcggcaatatcccgcgcgctcagcggcgtggtaccgcgatacaggttgtccgacgccgcctggtcgcctttggtgcgcaccagggtaaattccgtttcggcaatacccggcgcgagatcggtcacgcgcaccccggtcccgagcagatcgcagcgcaggttatagctgaactgcttcacgaaagccttactggcgccgtagacgtggctgccggggtagggccactgcccggcgatagagccgatattgatgatgctcgcgcccgcgccgtggttaatcagcgtcggcagcagcgcgtgggtcacgttgaccagcccggtgacgttggtgtcgatcatcgttttccagtcgtccagatccactttctgcgcgggctgcggcgacagcgccagcccggcgttgttaatcagcgtcgtgatatcggcgaagcccgcgggcagcgccgccacggccgcggccaccgcatcgctatcgcgtacgtcgagttcgataatgtgcaccggcacctgcgaggcgagcttatcctgtagcgtcttcagccgcgcaaaacggcgtccgctcagcaccagcgaccagcccgcatcggcgaagacctgcgccgctgcttccccaaatcccgaggtcgccccggtaataaacaccactttgctcgttgccatttcattctcctgtgcaggttgtcgctcccactataaaaaccgcgcgcgtgcgggcacagggccagtcggcgcgcggcgatgtgacacggtgtcacatcattttcgcctgactggctctatccgtttctcccccgcacggccaatgatgaggccaacaacaacgacatgagagagggcagggtatgaagctggcactacagaacgaggtagcgataagcaatgatgaagttcggcagctggatcgcgcttatgtgtttcattcatggtcgatgcagggcaatttacatccgctggtgatcgccggggcaaaaggctgcgagctgtgggattacgaaggcaatacttacctggatttcagcagccagctggtcaacgtcaacattggctatcagcatcctcgcgtgctggcggcgatgaaagcccagctggaagagctggtgaccatcgcgcccgccaccgccaacctcgcccgcggcgaagcggcgaagcggattgtcgagctggcgccggaaggctttagcaaagtgttcttcaccaacgccggcgccgatgccaacgagaacgccatccgtatggcgcggctctataccgggcgcgataaagtgctctccgcctatcgctcctatcacggcaataccggcagcgcgattgccgccaccggcgactggcgccgcgtgccgaatgagtattcacgcggtcacgtgcacttctttaacccctatctctaccgcagcgaatttaacgccgcgacggaagaggaggagtgccagcgcgcgctggcccatctgcggcggatgatcgagtgcgaaggcccgaacgcgatagccgcgattctgctggagtcgattccgggcaccgccgggattcttgtcccgccggagggctatatgcagggcgtgcgggcgctggccgacgagtttggcattgtgctgatcctcgatgaagtgatggccggttttggtcgtaccgggagctggttcgccttcgagcaggatggcgtggtgccggatctggtgactttcgccaaaggggtgaacgccggctatgtcccggccggcggcgtgctgattagcgagccaatcgcccgctactttgatgaccatttctttgccggggggctgacctattccggccatccgctggcgatggcggcgattgtcgccaccattgacgcgatgaaggaagagaaggtggtggagaacgcggcgaccatcggcaacgaggtgctgcgtccggggctggaagcgctggcggagaagcacgcgattatcggcaacgtgcgcggccgcggtctgttccaggcgctggagctggtcagcagccgcgagcggaaaactccgctgaccgctgccgatatggcggccattaaaggcgcgttaaccgaagccggcctgctggcgtttgtggtggagaaccgcattcacgtggtgccgccgtgcaccatcagcgccgaacaggtggcaaaagggctggcgatttttgatgcggtattcgcccgcttcgcgagcctggctcagtaaggggatgatttcccgggtcgcggcgtaaatgccttacccgggcgaccttctcgcagatggcggcgaacccgtagccccgctaagcgtagcgcgagcgggggcgggttttcagcctatccgatgttcgccgttcaccagcgcttcgcggttaaagaagcgctgaatcacgccttccgccataaacgccgcccggtccgacatatgggcaatcacatcggcatcgtggctgaccagcagataggtcattccgtgctcctgctttagccgattgagcagattcagtatttccgcctgcaccgacatatccagcgccgacgttggctcatccagcagcagaatctttggccgcagcagcagcgcgcgagcaatcgccacccgctggcgctggccgccggaaagctggtgcggatagcggcgcgcggcgtcggcaggcagccccacctcttgcagggcggtggacacccgctgttcgatctcgccgatagcgtgaattttcagcggctccgccagcgtgcgccatagcgtatgattgggatgcagcgaggcgtacgggtcctgaaacaccatctgtacgttgcgccgcagctcgccctgaaaacgcgcgcccggcgtaatggccttatcgaacagttcaacgcggccgcgccagtcccgctgcagcccggctaatacccgcagaatcgttgattttccgcagccggatgcgccgatcaggctgaacgtttctcccgcgtcaacggcaaagctggcggcggacaccgcggttttttcgccaaaaataacctgtaaatccttgagattaacgaccaccatgcgccgcctccgtcaagttcagggttcggtcgagggtcggcagcatctgaccgtaagtttgcgcggccgggcgacaggtccagagcgtacgggtgtagggatgcgtcgccttcggcagatctcgcgccgccatctcatcgaccttttccccttgatacaggaccagcacccgctggcagtgctcggccaccagcggcaggtcgtggctaatcaacagcatcgccatccgccgctgttcgcactgctctaccagcagttcgaggatctgattacgcagccgggcatcgagggctgaagtgggctcatcggcgatcagcacctgcggattattgagcagcgcaagggcaatcatcacccgctggcccatcccgccggagagttcgcctggataacggttgagcaccggtaaatccagaccgacggcggcaacggcggctttgaccgcctccagccgcgcgcggcggctaaggcgctgatgcagagttaatgcctcttccagctgcgcctgaatgttttttaccggattgagcgcgtagcgcgggtcctgcagcaccatcgctatatcgttgccgcgtagctcgcgccagccgcgttcgcgaagggttaatgcgtcgcgccccagcacgttgagcgcctcggcgctgacgacgccgggccggcgtaccagccccatcagggcgcgggcggtcatggatttaccggagccggattcgccgaccagcgccagccgctcgttgccgagcgtgaagcttaaatggtccaccactctggcggtgggatagtcgatggtcagtccctgaacgatcaggcgaggatcagtcatgttgcggctccagaacgtcgcgcaggccatcgcccagcaggttaaacgccaggctggcgatcaggataacggcgccaggggcggcggcgatccaccactggtcgaaaataacctgcatgccgtcggcgatcatcgcgccccattccgccattggcgggcgggcgccgaggccgaggaagccgagaccggcagcggcgagaataatcccggctaaatccagcgccagccggacgatagctgagggcaggcagagcggcagaatatgacccatcagcagacgccagccgcgaatgcccatcatctccgccgccgccagatagtcgctgtggcgcaggcgctgaatttcgctgcgcgcctgacgggcgtaagcgggccaggtcgttagcgccagcgccagggcgccgttcaccaggcccgggccgagcatcgcgacaaacgcgaaggccagaatcagccgcggcatcgacattaccacgtcggtaaaacgcatcagcacgcgctccagccagccgccgtaatagccggacaggatccccaccagcagaccggcggggagcgtaatcgccgtcaccagcgcgaccagccccagcgccggacgggcgccgaaaatcagccttgagagaagatcgcggccgtagctgtcggtgccgagccagtgccgcgggcccggaccctgcagccgcgcggcggcgtcctgccagttcgggtcgagaggagccagccagggtgcaaagagcgcaatcagcaggagtaccgtaatgatgatcaggccgcaaaaggcggcgggagaacggcgcaggcggcgtaaaaaaaggtagccaggcatcagcgtatcctcggatcggtcagccgcaccagcaggtcggtgaggttattaatcagcacaaagctcgcgccgatcagcagcgtaccgcccataatcgccgtggtatcgccggcaaagagcgcggtggtcagatagcggccaattcccggccaggagaagacggtttcggtcaacaccgcgccttccagcatggaggtccaggcgagggcggtcaccgtcagcagggtgccgcggatattgggcaggacgtgacgcagcagaatcgtcatctcaccggcccctttggcgcgcgccagcaggatgtactctttgttcatttcgctcaggcaggcggaacgggtcaggcgggtgatgctcgccagagaataataggccagcagcagcaccggcagcagcaggtgcccggcggcgtttttaaccgcctctttatcacccgagagccaggtatcaatgagcgcaaagccggtgcgcggttcgacggtgtactgataaatatcgtccagccgccccggccccggcgtccactgcagtttggcgtaaaacagcgccagcatcagcagaccgagccagaaaatcggcaccgagttgccgagcagcgtaaaggtgcgcatcgccagatcccacggcgagccgacgtagcgggcgcagagaacgcctgcgataacgcccgacagcgcgccgataatcagcgccagcgtagccagttcgagggtggccgggaaagcggcaagcaggtcgtgcagcaccggctggccggttgagctggcgataccgagatcgccgtgggcgagattcaccagatagtgccagaactgcagcggcaacggctggtcaaggccgagctggtggcgtacctgatcataggtggactgactggcgtggtcgccgacgatttgcagcacccgatcaaccggcgacagcgccgagagcgcaaaggtcaccagcagcaggccgagcagcgtcagggccagcgtcagcagtccctgaaacagcgcgagcagggggcgttttgcgcgccgctctgctcgggggggtaacacagcagacatggttattccgttggtaaaaagtacagtgttatcagctggcgcgatctgttgttgtagcccggtcagcgcagcgccaccgggaaaacataaggtatcggggcctgcgttcccggaggcggcgcgttgcgcctgtccgggctacgtgatcgtacctgccccaggcgttatttggttacccggtcataccagaccatatcggcattgagaccctgctgataacccttcacgttatcgcgaaccacaatctgggttttaccctgatcgataaacacgtaaggcgaactgcgctgcagcgcctcctgcatgtttttatacagatccaggcgcttcgctgcgtccggctcggcgactgccgccagggtcgctttattcagctccgggatctgccagccgtttagcccggcgacggtactggatttaccgtcgttgtacgcaaaggcgctggcgttagagtgggcatcgaaatagtcagggatccacagccgaatcgccgcctgatgctgtttggcgcgcacgcgagcatagacctggctacccgcggccggcagcaaatccaccttcacgccgccctgggcgaagctcgcctgcatcgactgggcgatggtgataaacggcggcttgttttcgacgtcgagggtgaaatgcgcctctttgatgcccgctttagcgaggatgtctttggctttttgcgggttgaatgtaaacgggttattgtccagcgcgcccggcaggccgaccggcaggaagctctgatggacgaaatattgccccttcagcaaatctttcgtgatgccgttgtaatctaccagccagcgcgccgcttcccagaaggccgggtttttcagcagcgggttggcgctgttgccggtattaaagaccagatagttctgctcagcggaagggatgctgaggaccttgacgcccggtttaccctgtagagccgcaatctggtcggcgccgagatcgcgcgccacgtcggcatcaccctgctggatgagaagacgacgtgaggccgggtccggaacgttcttaataatgatgcttttcagcttcggcgcgccgccgggtgcgctgctgttggcctccagcacgatggcctgatgcggctgatagacccgcattttatacgcgccgctgcccgccgagtgcattttcagccagccgttaccgaagtcgttatctttggcgttcggggcgacctgtttctcatcgacgatagaggcgatcggcgtggagagaatattcagcgccaccgccgggctgacgtcggcggtccagcgtagctccagggtatggtcgtctaccttcttcagctggctggcgatgttgtccggctgccagccgaggacgttaagaataaacgctggcgatttgttcaggatgaccgcgcgggtgtacgagtaaatgacatcttccgggcgcagcgggttaccggaggcgaatttggcgtcgggctttagcttaatggtcagggttttcgccgccggatcggcctgccagctttcggccaggatcggggtgattttttcagggttatcgcggtccggctgcaccaggcgctgataaaggctcggtaccgtctggatgctggagagctcgttggcttccgccgggtcgaggctgacgatatcgtcgaggccctgcgcgaccaccagggtccccggcggcgtggcggcgtgaacggcggcggataacgcggcgagcaccagcagcggcagcagttttttagtcatatgcgatccctgaaaaaagttattgtgattattgatgtttcgctacgttaggccgcttaattacgggcgtaaagtcaaagatcggctaagtttatgcttaaaaagcataagcaagaccaaggggttatgacgatcgatcgtaccgggcatcttccggccattcgcctttcttgatataacaatttgataacactacgggagagataagcgtgccggaaattaatgaatttggtcagcaggtcaacgatcgcgtgccagggtggcagggcgcgggacttctgcgccgcacggcgttaaatggccgcttttgccggctggagccgctggataccgagcggcacgcggcggatctgtttgccgcctatgccctcggcgacgacagcgactggacctggcttgccagcacctgtccacagagcgtggagtcaacggcgaactggatcaccggtaaggttatggacgacgggctggtgccgtatgcggttatcgatttgcgcgccgagcgggccgtcgggctggtcagctatatggcgattgagcgggcgatgggcacggtggagatagggcacgtcacctggtcgcgggcgatgaaaaatacgccgctcgggaccgaggcggtgtggctgctgctgcaaaatggttttgctcacggctatcgtcggctggagtggaagtgcgattcgatgaatctcgcctcccgccgcgccgccgaccggctggggtttacctgggaggggcgtcttcgtcagaggatggtgcgcaaaggacgcacccgcgatagcgatatgctgtcgattatcgatagcgaatggcccgcgcgcgacgcggcgctgcgggcgtggctggcgccggagaactttgatgctgatggacggcagctaaagcggctggaagattttcgctagtttttcctcaccctaaccctctcccgcagggagaggggcgggggcttactcttaccggcgaaccggcgcgccgttcgccacgtaatacgccgcggtgctcttcggcagcggctgacggccgcgaatggcgtcagccattttttcgccaatcatgatggtggtcgcgttaaggttgccggtaataatctgcggcataatcgaggcgtcgaccacgcgcaggccttccagcccgtgaacccgaccttcgccatccaccaccgccatctcgtcgtagcccattttacaggtgccgcacggatggaaggcggtttccgcatgattgcgcacaaactcatccagctcggcatcgctctggcactccgcccccggactgatctcccggccgcgatagttatccagcgccggctgatgcatgatttcgcgggtaatgcgaatcgcgtcgcggaactcctgccagtcctgttcgctggacatatagttaaacagaatcgccggatgttcgtgcgggtcgcgcgacttcagacgcacgtggccgcggcttggggagcgcatggagccgacgtggcactggaatccgtgctctttcaccgcgtttgagccgttgtagttaatcgcgaccggcaggaagtggtactgaatattcggccacgcaaaggcttcccggctgcgaataaatccgcccgcttcaaactggttgctggcgccgatgccggtcccgtcgaacagccattcggcgccgattttcggctggttccaccactgcagcgccgggtaaagcgacaccggctctttacattcgtactgcagatacatctccagatgatcctgcaggttctcgccgacgccgggcagggcgtgaaccagcggaatatcgaactggcgcaacagttccgggctgccgacgccggagcgctgcaggatttgcggcgaagcgatggcgcccgcgcagagcagcacttctttactggcggtggcgtttgacggcgcggtgctgtcgccctccagccactcgacgccgacggcgcgtttgccggcaaaaataatgcgatcggtcagcgcatgggtgcgaatggtcagattgggacgcgcgcgcgcctggtcgagatagccgcgcgcggtactggcgcggcgtccctgcggcgtcacggtacgatccatggggccaaacccttcctgctggtagccgttaagatcgtcggtgcgcgggtagccggcctgtacgccggcttcaatcatcgcgtggaacagcggattgttgccctgctttggcgtggtgacgctgaccgggccgtcgccgccgtggtagtcgttggcgccaatatcgcgggtttccgctttgcggtagtagggcaggcagtcgaggtagctccagtgctcaagccccggcgccgaggcccagttatcgagatccatagcgttgccgcggatatagcacatgccgttgattaacgaggatccgccgaggcccttaccgcgtccgcactccatgcggcgattgttcatatgcggttcaggctcggtctcgtaggcccagttatagcgccgaccctgtagaggaaaggccagcgcggcgggcatctgggtgcggaagtcgaaacggtaatccgggccgcccgcttccagcagcaggacggtggtctggggatcttccgtcagtcgtgtagccagtacgttgccggcggaaccggcaccaataataatgtagtcaaactgcaaaaatgacctcctggttaaaatatggattgaaactgacccatctcaacctggatggattttatctgggtgtagctgtgcagcgtctgcacgccgttttcgcggccaataccggagtgcttgtagccgccgaccggcatctccgccggggattcaccccaggtgttgatccagcagatcccggcctccagccgatgaatcaggcgatgggcgcggtttaaatccggcgtgacgacgccggcggcgaggccgtattcggtggcgttggcgcggcgaaccgcttcttcctcatcgtcgtagctcagaatcgacatcaccgggccgaagatctcttcgcggacgatggtcatctggtcatcgcagtcggtaaacaccgtcggggcgacccacgcgccgcggtcgaagccttcgcctttcagcacctcgccgccgcagagcaggcgcgcgccttcttgcttgccgatcgcgatgtagcgcagcacgttatcgcggtgcgggaagctcaccagcggcccgaagttggtgctttcagcaaacggatcgccggggcggatacgcgccacgcgagcgaggattttctcttcaaacgccgccttcaggcgcgccggaacgaatacccgggtgccgttggtgcagacctgtcctgagctatagaagttagccatcatcgcgatgtcggcggcgaggtcgaggttggcgtcttcgcagacgatcagcggcgatttaccgcccagctccatggtgacttccttcagcgaggaggcggcggagttggccatcacttttttgccgctggcgacgccgccggtaaaggagattttggcgatgtccgggtgctcggtgagatactggccggtttcggcgcccgtgcccggcagcacgttaaatacccccgccggcagtcccgcctcgcggtaaatttccgccagcttcagggcggtgagcggggtgacttcactcggcttaaagatcatcgcgttaccggccgccagcgccggggctgatttccacaaggcgatctggatcgggtagttccaggcgccgatcccggcgacgacgcccagcggttcccggcgggtgtaggcgaatgaactatcgcgcagcgggatctggctcccttccagcgccgggatcaggcccgcgtagtactccagcacatcggcgccggtgacgatatcgacggcggcggtttcgctcagcggtttgccggtatcgagagtctccagacgcgccagttcatcgttgcgatcgcgcagaatatcgaccgctttacgcagaatgcgcgaacgttccatggcgctcatcgccgcccagattttttgccctttttgggcgctctttaccgcccggtcgacgtcttcgcggccggcggcctggacggtcgccagcacttccccgctggcggggttaatcgtctcgaaggttttaccgctggtggcggaaacataaccaccgtcgatgtaaagctgctgttcggccattcgggacatgggtcctccattagtgagaagtcggtggcagatatttgctgatgaagtgctcggcgagcgtttcggcgcgggctttatccagcggtttaccgctcagcgccgcgcgtagccacagcccgtcgatcagcgcggcgagaccgtatccggcctcctgcgcctcttcgcgcggcagggcgcgctgaaactcatagacgatattcgacagcagtcgccggctgctgacctgctgcaggcgatagagcatcggctgatgcatgctgctggcccaaaaggcgagccaggccttcattgccgcgctgcttatctggctgtcgtcgaagtttcccgccacgatggcgcgcaggcgttcctgcgggccggcgccgggcagggcgtgcagacggcccaacaccgcctggcgcagctggccggtgatatcgcgcatcgtcgcttccagcagcccgttcttatccttgaaatagtggctgatgatgccggttgatacgccagccctccgggcgatctgcgcgatggtggcatcgtgcattcccacttcattgatggcggccagggtggcgtcaatcagctgccgctgccgtatcggttgcatccccagtttgggcatttctcagactccattcatcagctttgtttatctattaaagcggtttttgattggacgttcaatataaaatgtgtcttaattgttgccgattttggttctaatagttgcaaaaacagtaaggagaatggatgacagacctttcgccgagcagagaaaaggacaaaatcaatccggtggttttttacacttccgccggactgattttgttgttttccctgatgactctcttcttcagcgatttttccgcggcctggattggccgtaccctgaactgggtttcccgcacctttggctggtactatttgctcgccgcgacgctctatatcgtgtttgtcgtgtgcatcgcctgctcgcgtttcggttcggtgaagctcgggccggaacattcgaagccggaatttagcgtgctcagctgggcggcaatgctgttcgccgccggtatcggtatcgacctgatgttcttctccgtcgccgaaccggtgacccagtatatgcagccaccggaaggggcggggcagaccatggaggcggcgcgccaggcgatggtgtggacgctgtttcactacgggctgaccggctggtcgatgtatgccctgatggggatggcgctgggatactttagctatcgttataatttacccctgaccatccgctccgcgctctatccgatcttcggcaaaaagattaatggcccaatcggccacagcgtggatatcgccgccgttatcggcaccatttttggtatcgccaccacgctcgggattggcgtggtgcagctaaactacggcctcaacgtgctgtttgatattccggactcgctgggcgcgaaagcggcgctgatcgtgctgtcggtcattatcgccaccatctccgtgacctccggggtggataaaggcattcgtattctttccgagcttaacgtggtgctggccctcgggctgatcctgtttgtcctgtttatgggcgacaccgagtttctgctcaacgcgctggtgctcaacgttggcgactatgtgaatcgttttatgggcatgaccctgaacagcttcgccttcgatcgtccggtagagtggatgaacaactggaccctgttcttctgggcgtggtgggtggcgtggtcgccgtttgtcggcctgttcctggcgcgtatttcacgtggacgcaccattcgtcagtttgtggtgggaacgctgattatcccgttcacctttaccctgctgtggctgtcagtgttcggcaatagcgcgctgtatgaaatcatccacggcaatgcggccttcgccgccgaggcggtcgcccacccggagcgcggcttctataacctgctggcgcagtatccggcgtttacctttagcgcttcggtggcgacgattaccggcctgctgttctatgtgacctccgcggattccggggcgctggtgctgggtaacttcacctcgaagctgaaggatatcaacagcgatgcgccaaactggctgcggatcttctggtcggtggttatcggcctgctgaccctcgggatgctgatgactaacggaatttccgccctgcagaacgcgacggtgattatggggctgccgtttagcttcgtgatcttcttcgtgatggcgggattgtacaagtcgctgaaggttgaggattatcgccgcgagagcgccaaccgcgacaccgctccgcgaccgctcggcgtgcaggatcgcctgagctggaagaagcgcctgtcgcggctgatgaactatcccggcacgcgctatacccgccagatgatggagacggtgtgcttcccggcgatggaagaggtggcgcaggagctgaagctgcgcggcgcttacgtcgagctgaaaagcctgccgccggaagagggagacagcctgggccatcttgacctgctggtgcatatgggcgacgagcagaactttgtttatcaggtctggccgcagcagtactccattcccggctttacctaccgggcgcgcagcgggaagtcgacctactatcgtctggagaccttcctgctggaagggagtcagggcaacgacctgatggactacagcaaagagcaggtcattaccgatattcttgaccagtacgagcgtcatttgaactttatccatctgcatcgcgaagcaccgggcaacagcgtgaccttccccggaatgtaggtcatctaaacgttttctgaaaaaggattgcggctggttaaatatacagtgaattgcgcagggaagcgtatgatggcggcgggtgcctgaggctttctgcgttcaggcttaggtgaggattcagaaagacgaagccccaggagatgttcccatcaacctgaggctcacgatccaaccctagcacgttggatagtagcctcttcttcgcatggaggcaacgagatgctgacaaaatacgccctggtggcaatcatcgtgctgtgtctgacagcgctgggattgacgttaatggtgcgcgattcgctgtgcgagctgagcatcaaagaacgtagtatggagttcaaggccgttctcgcttacgaaacgaagaagtagccggtatgcggggagctatccccgcttatccgcaggctgggtaaggaaccttaaggcaccttttttctgcttatgggggcaggatggacggcgagagaacatcgaccggttaaaacaatcgcgccgccaccctgcatactgcttcgctgacgttaacctcacccttaccggcatttttctaagctaaatccgttctaccagcagacaaaaccaccatcaaccaccaggtcaacgccggtgcagaacgaggcggcatcgctggagaggaacagcgccgggccggccatctcctcaaccttcgccatgcgctggatcggcgtctggctttcgaattcgcgggtctgatgaaccatctcagggcgggtgttcatcggcgtggcggtatagccggggctgatggagttgacccgaatccctttgccgatccactccatcgccaggcttttcgacaggtggataacgcccgctttagagcagttatagtgcgcctgatcgagaccgcggttaacgataatgccggacatcgaggcgatattaataatcgaaccgccgcccgtttcctgcatcagttcggcttccgctttgcaggagttccacacgccggtcaggttaatatcgataacccgctgccactgctcggtttccatctccagcgccggattggcgttggcaatcccggcggcgttgacggctatatcgaggcggccaaagcggcttttcgctaatgccacgccggcgcgtaggtcgctaagctggcgcacatcaccggtgtagaagcaggcctctccgccgatggcttcaatatttttgacggtttcggcgaggccgccgtcttcgcggagatcgaagcagacgacccgagcccccgcgctggcgagcccgtaagcaatcatctggccgatgccgctgcccgcgccggtgacaaaggccacgcggtcctgcaggttaaacagctgttgggcaaaatcttttgcgatcatagttattactctctaaaaaaatattctttagcatgcccggtgttggcgttcccggaggcggcgcgttgcgcctgtccgggctacggggcttgtgccgtcgggtagtcgggtagcccggacaggtgcgcagcaccgcctccgggacatgatttgtgtagcctgacctgaaaaatgccaggctggcggcattacgacataatcaagccgccatcgatattgatggtctgcccggtgaggtagcgcgcatcgtcggaggcgagaaacgccaccagcccggcaacgtcttccggtttgccggcgcgcttcatcggaatgccttcgacccactctgccatcagctcgcctttaccgtagcgcttctgctcggtgctgaggatttcgccccagacgcggtcgttgtaatcccacatctcgctttcgataatgcccggacagaaggcgttaaccgtgatattccacggcgccagctcgtgcgccaggctttgggtgatgccgatcacgcccattttgctggcggcatagtgcggggtgtagataaagccctgacgaccctggccggaagaggtgttgatcaggctgccgtggttctgcttgaccatatatttggcggcttcgcggcagcacagccagacgccggtggtgttaacggccagcactttttcaaagtcggccttcggcatgcgatcgtaatagtcgatggtgatcacgcctgcgttctggatagagacgtcgatggtgccgaaacgcgctgccgcctgctcgtacagcgactgcacctgcgcttcgtcggtcacatcaacctgtaacgacaggatgtcggcctggtagcgctggcggagggtttccgccgtttcgtggacgcgctcggcgttagagaccatcaccagattcgcgccgtcgcgcgcaaagcgctcggcaatacctgcaccaattccgcggcaggcgccggtgataacaaccgttttgttgtggaaatttctttgcatgtttttcatcccttattgaagccggacggcagagcatccggcggggtaataaagacgtgattagctggtggcgcctgccgccgccagcttctcctcatggcggcgcatcaggatgactttgttctgcagtttctgctggaactggtcgacgacgacggcggtgacgataaccacccccttaatgaccatctgccagaaatcgctgacccccatcatcaccatgccgtcggcgaggaagacgatgacgaacgcgccaatgattgacccggtcacccggccgcgaccgcccgccagcgcggttccgccgagcacggtggcgccaatggcgtccatttcgaacatattgccggtcatcgggtgcgcggtttgcagctgcgaagcgacgataaggccgacgaacgctgagcacaggccggagaaggcgtaaacgaagatttttgccttgacgataggcacgccggccaggcgtgcggcggattcgttaccgccgatagcgtagatataacggcccagcggggttttggtggtcagccagtagcccagcagcaggaagccgatcatcagccagattggcagatagatgcccaacagcgtcccggatcccagggtggagaaaccggtgttgcccagcgcttccatgccgttgaggttggggtaggtgctgccgtcgttgaacagcagcgccgagcctctggcgacatacatcatgcccagggtgcagataaagggcgcgacgccgaagcgggtgatgaccgcgccgttaacgaagccaaccagcacgccgaagagcgccacgcagaggatcacttccggtacgttgaagaagataacgctgccgttccataagggcaggccgttggttaacagcgctccggccaccatgccgcagatgccggccacggcgccgacggagaggtcgataccgcccgtcaggataaccagcgtcatgccgatggccagcaggccggtgatggccacgtgctgggtcataatcagcaggttagatgtggtcaggaaattcggtaccatcacgctgaagaacgcgataaccagcagcagagcgatgaacgttctggccttcagcaggtacatataaatcatatatttctggttcatgatgggttccagcctgattaatcttgaggtgttgaagccgcgattaatttttcgcgggtcaccgcatgacgcggtaaatcggcggtaatccgaccgtcggccatgaccaggatgcgatccgccagcgccatcacttcatccagctccgatgaagagaacatcactgccagaccctgctgggccattttgccgatcagatgataaacgtcggttttcgcgccgacgtcgataccgcgagtgggctcatcgagaaacaccacttccggcttcgtcatcaacgccttgccgagcaccaccttttgttggttgccgccgctgagcgaggtgacaggcagatcggggtcgctcaccttgattgccagttcgcgaatcatctctttgacgcaggcgatttctttctgcggattcagccatttccacgcccggcgaaatccctgcaggctgaaatcggataaggtcatattcgattgaatcgacatcatctgcaccacgccttcgccctgacggtcttcaggcaccagcgccagcccttttttcagccgcgcctggaacggggccttttcgatattttcgccgttgagatggacgttaccgctctggcagggcatcaggccgaccagacctttaaacagctccgtgcgtccggcgccgagcaggccgtagatgccgatcacttctcccttacttaaggtaaaggtcacatcgttgagcttatagccgccgctggggtgcagcgccgtcaggccttcaacggcaaggaccgcttcgcctttcggcgccggccggtagtcgaaatgttttttcttatcgccgaccatctgttcgataatccacggaatactggcgtcgctgacctcgcgctcgctgataaagcgcccgtcgcggaaaatagtgatgtggtcgccaatttccatcagctcttccagacggtgggaaatatagataatggtgacgccgcggcgtttaagctgttcgatcacgttaaacaggattttgacttccgactggctgagcgcggaagtgggttcatccataattaatacccgggtgtccttagaaagcgcgcgcgcaatttccaccagctgctgatggccaatgcctaattcgccaagctgggtgtagggatcgacattcagctccagtctttccagtaatgatttggctaactcatattgatatttttcgttaatcttccctttttgaaagaattcgttagccataaaaatattatccatgacgttcatattcgggaataaatttaattcctgaaaaatgatgctgattccctgcttttcagcctgatgcgtcgagctaagggtcaccggggcgccatcaagaataatttgaccggaagagggtgtttcaacgccagcaagcattttcatcatggtggatttacccgcaccattttcaccgatcagaacgtttactttatttcgatagacccggtaattcacgctatctaaggcgacaacgcccggataaacgcgagataattcgcgagtttcgataataacttcagagtcgactggttgggaattgacgagttcttgccgctgcatgttattgccctcccaaacgaacaattttggctggcgtaatatcaggcatggtctgcggaatatcccaggccgagaacacgccgtacacctgtaccgcttcgccggttttcacctgcgccgtctggatcatcttcaccgcatgttcgttaatcgcccggctatattcgccaaacagcacctgatcgttaaagtcctgatagctggcgccctgatagccgtcgcgtaataatgtgccgcgcagcgttgggccaatttgcaccaccacgttgccgccgctgatatcctgaatcgtcatttttccgctgcgcgaagcggaatcaattttgctgatattgccttcgactttgacgtaaaacacgcaggggttttcgtcctgagcgcgatagcctaaggttttgcaggcgctatcgatatctttcgccgcgcgcagggcggtcatcagctcggcaacggggcgggctttagccacaacctggggaaccagctggtcttgccatgtccgatcgatatccgccatatgcgggttgggcggagatttaagatcggccagctcctgctgagagacgatacgacagcccccgagcgcaagaataaccagcgtcagcgagatttttttatacataatacgctcctgtgcgccccggacggggcgcaacaacccgaaatcaggatttgatattgaagtcctgcactttgtctgcattgtcctgagtaatcagaatgccgcggaacatcacgcgctgcttggccggtttttcacctttttgcaggtagttatcgaggtcggtcactccctgagcggcgatggcctgcgcctgaagcatcacggtggcctgcagggtgccggcttttaccgcgtcgcgctcatcgttgctgccatcgataccgaccaccaccacatcgttacggttcgcggctttcagcgcggcaatggcgccgagggccacaggaccgttgccgcaaatcacgcctttcacgtcggggtgcgcctgcagaatactgtccataatgcgcttgccgtcgattaaggtgcctttcgcgtcctgcttagcgacgctgaccatatccgggtactggtcaatcacctggtggaaagatttagagcgggtcacgcagttattatccgcaaggttacaggtcagttcggcatatttgcctttctccgccattttctcgacaaatacgttggcgacttcagaaccggcctggaagttattatgggtaatttgctccagcgcgatatcatcgacaggaatttcgcggttaattaaaaccaccggaatacccgctttcttcgctttttcaatggcggcgacgctggcggtggagtcggcgttatccaggataatgccctgaacttttttaccgatggcggtatcgatcagctcattctgttttttgacatcttcaccatgcgacaaaatggtggtctggtagcccagctctttagctttctcgctggcgcccttggcttcagaggcgtaataggggttatccagcgagttaaccatgatcatgatggtgcctttttctgccgcctgggcagcgaaagaaaaggcggtcagggtagcagcggttaaaagcgttaaacgtaatttcatgacaattttctctcttggttgttattgtcgggtacggtgaaacaacgtaaggcctgtaaatcgagtttatgggccgggggtctccttttgttgatgattaagagcctgtccattagggctattttactggccattttgaaccagggcagtgctcaaaaccctcacgtactacgtgtacgctccggttcttccgcgctgtccgtgttcaaactgcctgcgccaataacgcctactgggataggctctaaggtgcgtcacgcgttcgattccctggtgggcgtcaggcggacgttgccggtttccataatgttctgttcaccgcatgtcgccactcctgccatcttttctgcaggcgctggtggcgggccatatcggggataaattcgctgtgttcggttaaaaacgcgttcaggtcggtcaccgatccgggattcagggctttgcgcgcgagcagggccgcgccaatcgccgacagctcggcaacgtcgctgcgcatcaccggacagccgagcaggtcagcctgatactgcattagccagtcgttcctggttgggccgccgtcgaccatcagcgccgttaagtggaagtcgtcctgctggcgcatcgctaccacgacatcggcgatttgataggtaatggattccagcgcggcgcgaatcagatgggcgcgcttgacgccgcggctcaggccacaaatcacgccgcgggcgctgtcatcccaccacggggcacccaggccggttaacgccggcacaaaatagacgcccagcgtggagtccacggaggcgggcagggtgttgagttcatgcgccagttcggcatcggaaagttcgctcaggccggtgctgtccgccatccacgccacggcatcgccggtatgcggaatattaccttcgagtccgtaggtgatgctgtcgccgtcgtgccaggcgatggtggtggccagcgcgccgatatcgcactgtgcggattttaccggcgccatcaccgatgaccccgtaccgtaggtggctttcacgcaaccgagttcgcccagcgcgtggccaaacagcgcggcgtgggaatccccgaccatcgccattacgggaataccgtcagggatagcgttcaacccccgggtatagccaaacaatccgctggagggcttgatctccggcagtgcggcgcgcgggatctggaacagcgccagcatgttgtcatcccactggccggtttgcaggttcagcagctgggtacgcgcggcattggagtaatcgcagtagaacgcctcgccctgggttaagttccacagcagccagctgtcgatagtgccgaggcagatttctccgcgctcagccagcgcgcgcccctcaggaagagattccagcagccagcgcattttcgaggccgaaaacagaggcgcaatcggcaggccggtcacggccttgatttgccgctctttgtcgctgtggcgcagttcatcgcaaaacgcggcgctgcggctgcactgccaggtgatcgcggcgttgattggcttaccgctctggcgataccagccgatcgcggtctcgcgctggttactgatggctaatgccgcgacgttttctgcgccaacgtgcgctaccgcttgcgcgataaccgccagcgaagcgtcaaccaggacttctcccgactgctcgacccagccttcacgcggcgtctggatcgccagcggctgagagaatttcaccacgacctggccgcggctatcgagtacgacggctttggcattggtggtgccttcgtccagcgcaatgatgaactctttacgtgttgcctgcattaggtagtctcctgagtcacacttcgtcctggcgcggagggggaagtcggcattcctctttatcgcattgcttcttagcaggccatgatgtgacaattcgttttcacttttttaatcactgaatatatattcgatggtgattatttatttgttaccttagccagaaacttcccgtcgggctacaggaaaagttatcaattgtgctggcaatcacacttatccgtttggtgaagcttctggatgtcgggggaaaagagcgcggttggctggttatatacgattgaaatataaaaatttattggcgaagcctttacgcctgaaggaaagcgtaaaggctgtgggaaagtgtttgagtgaggaaattacccggcgataagcagcctggccgttggataatcggtgatcagaacatcgatataaccgcctgaaagcgcgcctttgatagccgccaccttctcgctgccgccggcaagggccaccacgttagggcacttcttcactttctccagcgccatgccgatcacaggatcttcatcatcgcgtaacaccgccttgccgtttttatcgtagtagtgcaggcaaatgtcacccacggcgccgcgttccgccagcacctgcagcatatcttcgtgatagtagttaccggacgttttgagcagttgcgaaggttcaaggatgccaatcccgacgatggcgatatcgacttcgtcgaagcgcgcaatcacatcggcgacatctttgctggccacgaggcgatttttctcctccgtagaaccttcgatgctctgggaagggagcagccaggcttcacagttcagacgctgcgccagggtctgggtcaggatggtcgcctgcacgttaccgttaggacccacgccgccgagcagttgaatcacgccgttggccttcaggttttgcgcgtgaacctcatcaaccattgcgcggatagtcgaactccacgacgagacgccaatcagatctttcggccgcaatcgcgtttccagatagtgggccgcggcggatccaatggcgcgcttgatggtgtgatcgctggcgtcctcttcggtatccacgacgatggcctgtttaattccgtagcgatcctcgaggcctttttcaagattgaggaaaatattcgatggctgaacaacgctgattttgactacgccttctttttggcagcgggcgatcgctcgggagataaatgactgagaaagcgagagaagttgagcgatatcggactgctttcgtccttcaagatagtagagcgtggcaatcttaactaatagccgttgttcatcctgcttagccatatatttccccgaaaatcatttacgtgcagccattatgttagagctcattatcatacgcgaaaagaaaagacagttaagtgtgatggatatctaactttcgccaatcctcaaaatcagctatggacaaaaacagaacagtagccgcataattgaataaagagtcgttagtgaatatatattcatggcgatttcaggtcaactgaaaagtgcccgggtgacgtcacgcccggtggtaaggaggcagaatgttcctgagtatgatgcagcggcgtaagccttacgatgcgttgcctggggatgtctggtttttttagtccctgacggaataaatattccaagttgaaaataaattcagaggtattaaatgaatccctatagctatgatgtccaggcccttgagcgtaaagcccgcgccgtacgtcgccatatcgtcagattgaacgccaacagccctgcgggcgggcacaccggcgccgacctgtcgcaggttgaactgctcaccgcgctctatttccgtattctgaacgtcgcgccggagcgtcttgctgacgaccagcgcgatatctacatccagtcgaaaggccatgcggtgggctgctactactgcgtgctggccgaggcgggcttctttccggttgagtggctggaaacctatcagcatgcgaactcccatcttccgggtcacccggtgcgccagaaaacgccggggattgagcttaacaccggcgcgctgggccacggtttgcctgttgcggtggggctggcgctggctgcgaaaaaaagcaacagctcccgccgcatttttttaattaccggcgatggcgagctggcggaaggcagcaactgggaagcggcgctagccgcggcgcactacggccttgataatctgatcattattaatgacaagaacaatctccagctggcgggtccgacgcgcgaaatcatgaataccgatccgctggccgacaaatggaaggccttcgggatgacggtcaccgaatgccagggcaacgacatggcatcggtagtggcgaccctggaagggctgaagcaggaaggtaaaccgaacgtcgttatcgccaacaccacgaaaggtgccggtatttcctttatccaggggcgcccggagtggcaccaccgggtaccgaaaggcgaagaaattgcactggcactggaggaactgaaagatgagtaatgcagaacacctggcgagcgtgatggttcaggcctttattgatgcggtcgaccgcggcgtcgatctggtgccggtggtggctgactccacgtcaacggccaaaatcgcgccgtttattaaacagttccccgggcgtctggtgaacgtgggtatcgccgagcagagcatggtcgggacggcggcgggtctggcgctggggggcaaagtggcggtcacctgtaacgccgcgccgttcctgatttcccgcgccaatgagcagattaaagtcgacgtttgctataacaacaccaacgttaagctatttggccttaacgccggcgccagctacggcccgctggccagcacccatcacgcgattgacgatctggcggtgatgcgcggcttcggtaatatccagattttcgctccgtcttcgccacgcgaatgtcggcagattatcgattacgccatcggctatcaggggccggtctatattcgcctcgacggcaaggcgctgccggagctgcacgatgaaagctatcgctttgtgccgggagcggtcgttacgctgcgggaaggcgaggatatcgcgctggtggccaccggctcgacggtgcatgaaatcgtcgatgccgcgcagaggctggccgacgcggggattcaggccaaagtggtgagcgtgccgtccattcgcccttgcgataccgccgcgctgctggcggccctgaagccgtgcaaagcggtaataacggtggaggagcataacgtcaacggcggattggggagcctggtggcggaagtgctggccgaagccggcgcgggaatcccgctcaaacgtctggggatcccggatggcgagtatgcggcggcggcggaccgcggctggctgcgcaaacaccacggcttcgatgcagcttccgtcgccgagctggcgcagaaaatgcgctgattttacggcgccgtaaaccgataacccgcgcggtctgccgcgcgggttttgttttttacgctgcgcagagcgtgatgacgtagtcaccggccttaatccattgcagccgatactccccggcggagagccgaagaagcagatttccttcctttatatacgtcacctcaaaatcgctgaaacccacgcagttctgtatttcgggcgggctggccttaaatgcgctctcttttgccgaaaacgccagcgtcagcgccagcgccgacggcaggccgctggcgtccagcaggcttttttccgcgctattgacgatgctgctttccagctcggccgcgagggcgggagacaggatgcgttcaatatcaacgccgaccggcccggcggagacaaccgccagcgcgctgcgttcgcagtggctgatgctgccgtaccacggcgcgggccacaggggctggcgttggtcgccaatggcagggatctctgtctcaccgacctcccgcagcgcgtaaaccgcggcgatacgccccgcgaggtgctcggtctgccgcttgcgggcgcagtcgcttagccgggcatgatgaggcagccagaggagatcttcaggccgaaaggtcaatgggtcgaaatcgacacgctgcagcgagcgatcggcaagctgaataatagaacgttgggtttgcataggggggatgttaacagattctccccgccgccctctatggcaagagggcggggggaacggccagacaatcagaagtgggtattgacgcccagataccaggttctgccagattcgttataggtgttggcgcccgcgccagccatataagaaacatcggtcaggctaccggtggtttgcgcattccccgcgcgccagtggcgcttgtcgaagacgttatccacgccgccggtcaggctgacgtttttggtcacatcccaggtggcgctcaggccaacgatgctgtatgggctgacttcatccgtttcagaacccaccgcgggctcacctttgtagttatatttcttcggctgctgcttgccgtaccaggtgaaggtcgactgcaccgaaatatcctcctgaatctgccagctcagagtggagttcagggtatattccggaataatcgacagacgatcgccggtttccttgtttttactttgcagcatataagtgatgttattggtccagttcaccgtttcggtgaccggcacgttcagggtgccttccagaccttcaaccaccgctttaggcacgttttcccactgatagatatcagttttcactttaccgttcgtagtctgcgaaatcggcgcgtagccggcttcgattttatcgcggtagtcgttgcggaaccaggtcacccccgccagccagccgtcgcgtttaaactcaaggccaatctctttgttgatgctggtttcggctttcaggtcatcgttacccatcatgtagcaaccggtaccggtgccgctggcgtagcagccctggcctttgctatagagaatatagttcgggttggtttggtacaggctcggcgctttataggcgcgggcgatgcccattttcaacgtgaagtcatcccacagaccctgagacaggttgagcgacgggctccagttgttgccgacgatcgtgtgatgatcgaaacgcagcgccggcgtcagcatggtggtgtcggtcagctccacgttgtcttcggcaaacagggagaagatctcggccttcgagtatgggctacggccggtgctgtcatagccgtcgatatcgccgcccataaaggtctgggtatttgacgccaaatccttcatccgctgctgattccactcggagcccagcgtcaggttctggttaaacaccagatccagcgggatgttaacttcgctgtgcagcatcacgtcggccaggtcgatatcgctgaactggttgctgttgaagataccttccgtaccgcccgccagaccttcgcctttacgcgagttgcgggtacgttcgtactgggcccagttgctggtggtcacgccgttatcccagccgccgttccaggtgacggagtaagtctggcgatagaggcggttcgtctctttcccgtagttctcttttaccagatcgttggtattggtgttctgcgtatcgcccgcgtagaggttgccctgacggctgtagccggattcaaactccagcgactgcatcggggcgaaatcccagcgcacgacgccgttaatgttcttatttttaaccccttcacgcccggcaggcatggtattagcgtacgcgccggtacgctctgactgatgcccgtcgttgatatcccaggcatcggcctgcgttttatcgaggttgcccagcaggcggaagctgaaatcgccgcccagcgggccgctgaggctaaagttggtgcgtttggtcgagccttcttctttatgctccggggcgttcatgtaggtgttccatgaaccatgccattcgccgtcgcttttcttggtaatgatattgaccacgccgcccgccgcgccgttgccatagcgcgcggccgccgggccgcgaatgacttcaatacgttcgatcagctccggcggtacccatgaagtatcgccgcgggtatcgcgctcgccgcgccagcccagacgcacggagttgcggctggtcacgggcttgccgtcaatcaggatcagggtgttttccgggcccatgccgcgaatatcaatctggcgattgttgccgcgctggccgctggtggagttgccggtcaggttaacgccgggcatggtacggataatttccgacacgtcgcgcgctggcgggcgtttacgaatttcatctgcggtaatggttgaaacgccgggcgcctgcaggttctgctcggcggcggtgacgaccatggtttcatcagcggttgcggttttgctatcggaggcggtttccgccgcgctcagcggaaacgcagccccgtagattcccagattgaccagcaaggccagggatttgatcctgttattcattgtaattcctgctttttgtcgccaccttctccaaaagacccttcccagcgggaggagaggcggtatcaatgttgccggtagagggcaaagggcgctccgtcgcggactaaatgagccctctcagacatgtttaattttgaaagacgcgcttcccacagcgcgctaatacgctattgcaaatgaaaatagttatcaataatattatcaataaatattgcgtttattaatgcgtttgttgataaatgtcacgataaacatagggttgaaaaggaatgcataagacaggaagtgacgactggtggcagcatatctccggcccgcaaatcgaagccgttgacggcgcgtatcgggtaaccttctggtggcgcgatccggcgggcaacgaaacgtcttcggcaacccggcgggtatggatttatatcaccggcgtgactgaccatcataaaaatgccgtaccgcaaaccctgcggcgcattcccggtaccgatgcctggtgctggcaaaccacgctttctccgacctggcgcggcagctattgctttatcccttccgcccgcgacgacgacttttccccccagctttttaacggtgacggcccggaccgcgcgctgctgcgcgaaggctggcgcaggctgctgccgcaggcgattgccgacccgctcaatccgcaaagctggaagggcgggcgcggccacgcggtctccgcgctggagctgccgcacgcccccgaacagcccggctgggcgctgcgtgatgaaccttatcagccgccggtctgcattgaatggcagagccagcgactcggcaaccggcgacggatatgggtttacgccaccggcgacgcgcagccgcaggcgcgcccgctggcgatcctgctggatggccagttctgggccgaaagcatgccggtatgggcgccgctggcgggcttaacccgcgaaaaacggctcccgccggcggtttatctgctgattgacgcgattgataatccgcaccgggccgcggagcttccctgcaatgaggcgttctggctggcggttcaggaagaactgctgccaatggttcaccggctggcgcctttcagcgatcgcgccgatcgcacggtggtggcgggtcagagctttggcggcctggcttcgatgttcgccgcgctctactggccccagcgctttggctgcgtgctcagccagtccggctcttactggtggccgcatcgcggcggcgcgcagacgggcctgctgattgaccgcctgagccgcggcgaattacatccgcaagggctacgtatctggctggaagccggtatacgcgagccgatcatttttcgcgccaaccaggcgctgctcgcgcatctggaacagcagacgattttctggcgtcaggttgacggcgggcatgatgcgctgtgctggcgcggcgggctgacagccgggcttatccagctgtggcagcctttatgccgtgatgagtaacaacgcgcgctttacgaggaattagacatgcaattcagtaaccccttcgacaatccgcaagggcagttttacattctgcgcaatgaccagcagcagttcagcctgtggccgcaccactgcgccctgccggaaggctggtcggtggagtgcccgccgcagtcgttagcggcgtgcaatgactggctggcggcaaactggtctaccttgacccccgcccaccatgcatcctgaggagcccacgatgaccatacgtttaccgctggttgcggcgcagccggggatctggatggcggagcgcctctcgacgctgcccggcgcctggagcgtcgcccactatgtcgagctgcgcggtgatatcgacccgatactgctcggccgggccattgtcaccgggctgtcgcaggccgacaccctcagcatgcgtttttgcgaagataacggcgaagcctggcagtgggtcgatgaacatcgcgcgtttgccgaaccggattaccgggatctgcgtgccgcgagcgacccgcacgcggccgcgctggcgctgatgcaggccgacctcggacaaaacctgcgggtggacggcggcaatccgctggtttgccatcagctgctgcgggtgggcgataaccgctggtactggtatcagcgttaccaccatttgctggtcgatggcttcagcttcccggcgattacccgccagatcgccgcgatctaccgcacctggcagcgcggcgaagcgacgcctgattccccgtttacgccgtttgccgaggtggtggaagagtatcagcgctactacggcagcgacgcctggcagcgcgacaaacagttctggcaggcgcagcgtcaggcgctgccggcaccggcctcgctgtcggactcgccgctggcgggaagggcgaccagcagcgatatctggcgcatgaagctggaggtggatgccggggtctttagccggctggcggcaggcgcgccgcagtgccagcgcgccgatctggcgctggcgctgaccgccctgtggctgggacggctgtgcagccgaacggactacgccgcgggctttatttttatgcgccgcatgggctctgcggcgctcaccgctaccggccctgtgctcaacgttctgccgctggcggtcactattgatgccggggaaacgctgccggagctggccacgcgtcttgccgggcagctgaagaaaatgcgccgccatcagcgctatgacgccgaacagattgtgcgcgatagcggcagagcggcgggcgatgaaccgctgtttggcccggtgctcaatattaaagtcttcgactatcagctggatatcgacggcgtggaggctattacccacactctggccaccggcccggtcaatgacctggagctggcgctcttcccggatgaagccggggggctgtcgctggaggtgctggcgaataagcagcgatacgaggaacggacgctgcgtaaccatatctcccgactctccgcgctgctggcccagtttgccgataatccgaccctgcgctgcggtgaggcgaatatgctgtcggcggcggaaacggaacagctgcggcaggtcaacgcgaccgctgtcgacctgccgctcaccaccctgagcgcgctggtagcggagcaggcggcgaaaaccccgaatgcccctgcgctggcggacggccgctggcagtttagctaccgcgagatgcgccagcaggtggtggcgctggctgaacagcttcgcgcgcggggcgtcaagccgggcgatagcgtcgcggtcgcgctgccgcgttcggtattcctgacgctggcgctgcacggtattgttgaggccggcgccgcgtggctgccgctggataccggctatcccgacgatcgtctgcggatgatgctggaagacgcccggccgtcgctgctgattacctctgaagatcagcgggcgcgctttagcgatattcccggcctggaaagcctgtgctaccagcagccgctgacggcgtcggatgccgcgccgctggcgctctcacggccggagcatactgcctatatcatctttacctccggctctaccgggcgaccgaaaggggtgatggtcgggcaaaccgccatcgtcaaccgcctgctgtggatgcaggaccactatccgctccgcgctgacgacgtcgtggcgcagaaaacgccgtgcagctttgatgtgtcggtctgggagttctggtggccatttatcgccggcgcgcagctggtgatggccgagccggaagcccatcgcgatccgctggcgatgcagcggttctttgcccgctatggcgtcaccaccacccactttgtgccgtcgatgctggcggcgttcgtcgcctcgctggaggcggagaacgtcggcgcctgccaaaccctgcgccgggtattttgcagcggcgaagcgctgccgacggcgctgtgtcgggaatgggagcagctgaccggcgcgccgctgcataacctgtatggcccgacggaagcggcggtggacgtcagctggtatccggcctgcggtcccgaactggcggcggtaagcggcaccagcgtgccgattggctggccggtgtggaataccgggctgcgcattcttgatgccgccatgcgcccggtgccgccgggcgtggcgggggatctctacctgaccggcattcagctggcgcagggctatctggggcgccccgatttgactgccagccgctttattgccgacccttacgcgccgggcgagcgcatgtaccgcaccggggacgttgcccgctggctggataacggcgccgtcgagtatctcgggcgcagcgacgaccagctaaaaattcgcggccagcggattgagctgggcgagattgaccgcgcgatgtccgcgctgccggacgttgcgcaagcggtggctcacgcctgcgtcttcaatcaggcggcggcaaccggcggtgatgcccgtcagctggtgggctacctggtttctgactccggcctgccgctggacgccgccgcactcaaagagcggcttggcgaacagctgccgccgcatatggtgccggtggtgctgatacagctgccggcgctgccgctgagcgctaacggcaagctggatcgtaaagcgctgccgttacccacgttgagcggtgagcgcagtggccgtccgccggagcctggcgtggaaaccaccgtcgccacggcctttagccagctgctcggctgcgaggtgaacgatatcgacgccgatttcttcgccctcggcggccattcgttgctggcgatgcgccttgcggcgacgctcggccgcgagctggagcggcgggtgacgccggggcaggtgatggtcgcgtctaccgtcggcaagctgagcgcgctgctggcatcggacctcagcgatgagcaggcgcaacggctgggcttcgacgctctcctgccgctgcgcgagagcgacggcccgacgctattttgcttccatcctgcttccggttttgcctggcagttcagcgtgctggcgcgttatttaagcccgcgctggtcgatcgtcggcattcagtcgccgcgaccgcagggaccgatggccacggcggcggatctggatgcggtgtgtgaacatcatctccacactctgctgacgcagcagcctcacggcccctattatctgctgggctattcgctcggcggtaccctggcgcaggggattgccgcccggttacgccagcgcggcgaagcggtggccttcctcgggctgctcgatacctggccgccggagacgcagaactgggcggagaaagaggcgaacggtctggatcctgaggtgctggcggagatcgcccgtgaacgcgaggcgtttctggccgcccagcaggggcaggcttccggcgagctgttcagcgttatcgaaggcaactatgccgatgcggtgcgcctgctgaccaccgcgcacagcgcgaagtttgacggtaaggcgacgctgttcgtagcggagaaaacccgtcagccggggatggacccgcaggtggtgtgggggccgtgggtcggcgagctggaggtattcagccaggattgcgcccacgtggatattatctctccgcaggcctttgaagcgatcggcccggtgctcagggagatattaggttaggggcagatgaactcccgggttgcggctaacgccttacccgggctaccgtttgtgccagattgggtagcccggctaagcgcagcgcgagccgggaatctctacttgcgacccagcggcaccaccagcggcgtatgcgccaccggatcgtcaatgatcgtacagcgcaggccgtaaatttcctcgatcagcgccgcattgacaatctccttcggcgcgccctcggcgacgattttgccgtcgcgcagggcgatcaagtgggtcgcgtagcggcaggcctggttcagatcgtgcagcaccgccgccagggtatagcccttctcctgattcagctcgcttagcagctcaagcaggtcgatctgatggctgatatccagccaggtggtgggctcatcgagcagcataatcgccgtctcctgggccagcaccatggcgatccacgcccgctggcgctggccgccggagagcgtatcgacgctttgcagcgccaggtcggtaatgccggtggccttcatcgccctgctgaccgcctcttcatcctctttgcgccagcgggtaaacagcggctggtgcggatagcgcccgcgggccaccagctcctgaaccgtaatatctcccggcgtagtggcgttctgcgccagcaggccgatccgcttcgccacctctttactggcgtaacgctggatctgctcgccgtcgagatacacatgaccggatgtcggggtcatcaggcggctcagggtgcgcagcagcgtcgatttaccgcagccgttagggccaataatggcggtgaagtggccgtcgggaatggtgacgttcagcgattcggcgatggtttttttgccgtacgccagggtcagctggtcgccgcgcaaacgggaggttacagcggtcattttttgcgggactcctgaattaacaacccgataaggtagatgccgccaaggctgacggtcaccacgcccaccggtaactgatagggcataaacagacgctgcgcgcagtagtcagacagcgccagcagcagagcgccgcacagcgccgcctgggccagcccccagcgcgcggtgccgctgaggcggcgcgcgatatgcggcgccaccagggcgataaacgaaatcggcccggcgagcgcggtagcggcggcggtcagcaccaccccgaccagcatcagcagcagccgcgagcgctcaacccgcacgcccagggcgcaggcggtatcgtcacccatctccagcagccgcatgcgccgcgccagcagcgccccgcagaccagcattagcagaatcagcggcgccgagggccaggtttttccccaggtcaaaccgttaagcgaaccggcataccacagcccggcggagagggcggtttccagcgaagcgcgcagcagcagccaggtattgaatgccaccagcatagcgcgcacgccgatgccgataataatcaggcgaaaggtttcaatcccgttgcgccacgccagcagccagaccgccagcgcggtaaggatcccgccagccatggccgccatggcgatggccgccaggttctggccaaacatcaccatcgctaccagcacgccgctccaggctccggtgttaaaccccatcacgtccgggctccccagcgggttgcgggtcagcgactggaaaatcgcgccgctgacgccgagggcggcgccaatcagcagcgccatcagcacgcggggcaggcgccactcggtcaccaccatggcgacgttgcgcggcgcatcgccgagcagcgccgagataacctgctcaacgctcaatggcaccaggccggtgcccagcccccacagggagaccagcgcgctggcgaccagcagcagcaggcagctaaaaatcaggcgacgagaaggcgcaatcacatgccacctccgcgcggctggcggcgtaccagccagatcagcaccggcgcgccgataaaggcgctgaccaccgaaacccgcagttcgccgggcaccagcaggcgccccagcacgtcggcaaacagcagcagggcaggggtcgccagcagggtcaccggcagcgaccagcgatgatccgcgcccaccagccagcgggccatatgcggcatcatcaggccgataaaggcgatgggcccgaccaccgccgtggcgctgccgcacaggacggtaatcgccagcagaccaataagctgagtacgcgcgacccggctgccgagcgcggtggccgtatcgttgccgaggctcaggctgtttaaggcccggctcagcagcagcgtcaccaggccggcaatgagtaccgggatcagcacgattttcagtgtttgcagggtgcgcacatccagcgagcccgcctgccagaagcgcagctggtcgtagacgtcagggttaagcagggcgataccgctggaaagcccttccagcaccgccgccagggcgacccccgcgagggtcaggcgaaccgggctcagctggccgccgccctggctgccggtaaaggctaccagcagcgaggcgccgaacgcgccgcaaaaggccatcagcagctgctcctgcggcgaggagagaccaaacagcgccgcgcccagcacgatagcgaagctggcgccggagttgacgccgaggatccccgggtccgccagcgggttgcgggtcagcgtttgcatcagcgccccggccagacccagcgcggcgccggccagcagcccggcgagggttcgcggcagtcgtgcatcaaggacgatggtgcaatcggcgctctggcaggtgccggtgaaggcatcaatgacgacgctaaacggcaggggtttggcgccgaccagcaggctgagcgcaacggcgatgattaaaacgattaaaagacccggcacggcaaaggcgcgcgccgcggtcgtggaagacgacatggcttacatccctgacatgataatgatagtaattatcgttatcgattctatccggttatgttagcatgtgcacccataaaaatggtatggaaaataataacaaggcgctgtcatgaaccgacaatcctggctgctgaatctcagtttgctgaaaacccacccggcctttcgcgccgtctttatcgcccgctttatctcgatcctgtcgcttggcctgctgggcgtggcgatcccggtacaaatccagctgatgacccattccacctggcaagtggggctgtcggtgaccttaaccggcgggtcgatgtttgtcggtctgatgatcggcggcgtgcttgccgaccgctatgagcgtaaacgtctgatcctgctggcgcgcggcacctgcgggattggcttcgtcggcctgtgtctcaacgccatgctgccggagccgtcgctcatcgctatctatctgttggggatctgggacggcctgttcgcctcaatcggcgtgaccgcgctgctggcggcgactccggcgctggttggccgggaaaacctgatgcaggccggggcgatcaccatgctgacggtgcggctgggctcggtgatttcgccgatgatcggcggcctgctgctggcaaccggcggcgtggcctggaactacggcctggcggcggcaggtacctttattacgacgctgacgctgctgcgtttgccgcggctggcgccgccgccgcagccgcgcgagcatccgctaaaatcgctgtacgcgggactgaagtttctgtttaacagcccgcttatcggcggcattgcgctgcttggcggcctgctgaccatggccagcgcggtgcgcgtgctctatccggcgctggccgggagctggcagatgtcgacgtcgcagattggcctgctgtacgccgcgatccctctgggcgcggcgttcggggcgttgaccagcggacagctggcgcagacggcgaggcccggcgtgctgatgctggcgaccaccgttggctcttttgtggcgattgcgctgttcagcctgatgccggtgtgggcgctgggcgccctgtgcctggcgctgtttggctggctgagcgcgataagctcgctgctgcaatatacgctgattcagacgcaaaccccggaaaatatgcttgggcgtatcaacggactgtggaccgcgcagaacgtgaccggcgatgcgataggcgcggcgctgctcggcggcctgggcgcgattctgacgccggccgcttcggcgagcgccagcggctgggcgctggtcattgtgggcgtggtgctggtggggctgctacgcgagctgcgccgctttcagcgcccggagacggcgagcgaaaattaattgagccgggttttcccggaggcggcgcgctgcgcctgtcctggctaccggcccgcagacggcggtggactccaggcccgggtaagcgcagcgcaacccgggaagaagccgcaccgatgtatttatcccggcgcattcccggaggcggcgcgctgcgcctgtcctggctaccggcccgcagacggcggtggactcgtagcccgggtaagcgcagcgcaacccgggaagaagccgcaccgatgtatttatcccggcgcattcccgggttgcggcgtaaacgcctgacccgggctactggcccgcagacggcggtagactcgtagcccgggtaagcgcagcgcgagccgggaagaagccgcaccgatgcattcatcccggagcaacccaggctaccgacctgcagttgcccggtaggacccgtagcccgggtaagcgcagcgcaacccgggaagaagccgcatcgatgtatttatccccgtacattcccggttgcggcgtaaacgcctgacccgggctactagcccacagacggcggtggactcgtagcccgggtaagcgcagcgcgacccgggaagaagccgcaccgatgcattcatcccggagcaacccaggctaccgacctgcagttgcccggtagcgccaccgggaaaaccgaaaagagcgataataaaaagccccggatcgctccggggctggctatcactcgtcagtgactatttacgcttagtacgcgccgagatcgctccagacctggaactgaccgcagttcagatccggctggttgccctgagaccaccatttcacctggtagttatggcctttccagctcacgatttcaaagctgccccagttgctaccatagacggtgctggcattccacagcgggtaaggcgtggtttcgtcagaaggaacaacatcatcatctgccggttgaggcgtatcatcggtgcgatcctggtcgtcagccggctcgtcctcggtatcatcggtctgagtcgcggcgacgacggagagcacaaagcgctgctgcgttgacggttcaccccaggtatcgcgcacgaacagggtgaaggtatactcggtatcctcagccactttcggcacatcgaactcaatgaccgccgcggttttatcggcgacgttgatcgccgcgggcacgccccagctaaaggtcaactcgtcgttatcttcatcagaagatttttcgccggaaaggcgcacgcgggagccgcctaccaccatcagttcgatagcggctttcggcgcatggtttaccgacggttcaggctggacggtatcctcctcctcttcctccggttcagccggttcatccgccgggtcgacgttgatgccttcgaaatagaacggctccatatcgataacttcagacgccatttcatagcccagaccttcacgggcggcgttaaccagcacgccgttgtcctggtcgattgtccaggtgaacagcgcgcccaggccgaggctggcggcgtattcgcccttggctttcaccgtgcgcggcgtatccagggacatgaacagtttgctgtcagggttgtagaggtagtccgcgtcggcaaccttgtcggtgtagacgttgaagccgttacggcctttctggttttccagatccaggtagttataaatgatgtcgtaccattcggtggtacccgattcgaaggagccgacggtggtgccggtgcccgggctataggtgcctttcagcggggacagggattccagctccgcgttgcgcccgttacgggtataagcagcgtaaccaatgttgattcgctctgccgggaagccttcggacagcagatggccgacaacggtatccaccccccagccgccttcttccagcgccttcaggttggtgtggtgggtcacgctctccgcccacggggtaccgaagaagtcataggtcatgacgttgataccgtacaggcccgctttcagcagcgcattgacgttgggagtagccgagcgtcttgaccaccgcggagctggcaatggagattttgacgttgctcaggcctgcggcgtccagctgcttacgcagttcgccaatcagcagggcgtagttctcgccgtcttccgggccgtacgggttgccagcgccttcggcgttcggatattcccagtcaatgtccacttcgctgaacatcgggaactgcttgaacagttttaccacgcctttggcaaagaccttacgcgaggcgtcagacgcggcagtttcatggaaaccgttactcatactccagccgccgatgctcatggacagcaccaggtcgtggccctgctgcttcgctttagcctgcagatcgcgcaggccgccgagcaggcctttagtattactctgggtcacggtcttcggatcgacatcccagccgctgacggtatggccaacgttaacgtaagactggaagtcgccccacgggtcgaggaaggtgggctcgtacttcacttttccgcactgatcggcaccttcggcaaccacgtcgcgccacaggttgtccactttgtggaagccggtcacgccgacgaaaccgacgatgattttgtcgtaggcggtaggagaaacgttggtcaggtcgtagccgcgaccgcggttatcttttgaattatcgccctgcagacgaccatcatactgtgaccagtcggtgtagtagccgaagactttgggtttggtggtggaggctttgtatttgttatagaccggtttagcgacgcgagcggaggtatagctgtatgcgctcacttctgttgccgggttaaagccgtctgcggcgttgctggtttcggtcagcgtatcgcccttaatcaatttgctcgttgccacgttaatttccttctgtgttgaatgaccacctcaagcggtgtggggcagataatcgggcaacgcggcggccggggctaatcacaaattaacacctgaaacgatgatatttcggctgatgggcgatgagggtgatagggcgctaaacggtgaaaaagcctgttataacaacgcgatgatatatgaaatgaggcgcgatgagatcccggcgaccgacgccgggaagcgtggcttatgaaaagagggccgctaagcgctgcagcaccagcacggcgctgtagtaatccaggcggaaggtttccgtccccagcggataaacgcgtttgccttcaacggcgggcagatgcgccagcagcgggttggcgttaatcgcgtcggcatccttttggtcgccggcaaacaggaacaggctctggccgttaagtccggcggctaagttttccccgcccagctgcacgatatcatgacgttttccctggctctggctggcatgcagcccgccgggcaggtcggcgagggtaaagcccagctgctcgagcagctgtccctgagcggattctttggtccagatattggcgctatgggccgcggcggtgtagaccagcgcggtgaccggctgcggcggcagcttcattttctctttcagcgccgccagctttttatcaaactccgcgattctctccgccgcctgtttttcgtggccggtaatctcccccagttggatcagcagggcctgccagcttttatcatcgtagttaatgataagcgtcggggcgatggtggaaagctggtcgtagagcatcatcgccgaatcgccgccggtggcgctaatcagaatgagatccggcatttgcgccgcgacggcctcagcgctcggttcgccaatatagaggcgcgacagcttgcgcgctttcgccacatcgctccactggcgtaaaaatccctgaccgtcggcgacgcggttattgggcgtcgtggccccgctggccaccaccggcgcgtcaatcgccagcagcgagccggtcagcgtcacgctggtggaaacaatgcgcagcggctggctttccagcgtatggggtccccggctgtcggttatctgacgcggccagtctgtcgccagcgctgagctaattccgaaaatcgccaggccgctggcgaggagggtacggcggcaaaaggtggagaaattcacgtattcgcatcctggttaagtagtgataaatgcttctcattttcagctgtgagcggcgtcgatgcaagcttaagtcgcacaacatgctacctgtacggttgacatagcgcgcaataccttttaggttacccaaccaaaatataaatgataattattcgtaatatctttatcgtttttggaggatgatatggaaacgtctttggctgaggaagtacgggagaaaaaaatgactctgccgccggaaagcttcttctttatgtcgccgtaccgcagcttcaccaccgctggctgctttagtcggttttctcatcctgccgccgatggcgaaaatctggacggggaattccagcgcaaaatggctgccgcctttgcagcggcgcgggctgccgggatcgctaagccgataatggtcggcgccattccgtttgataccagcgagccgtccgagctgtttatacccacaagctgggaaaccttctcccgaccagaaaagcagcactccgcgcgctatgcgtccgggcagcagccgatggacgtggtgcagcgccgggagatccctgaacaggacaccttcatggcgatggtggcgcgcgcggcggccctcaccgcgacgccggaagtggacaaagtggtcctctcgcgcctgattgatatcaccacccgcgaacgggttgatagcggggcgctgctcgagcgcctgatcgcccagaacccggccagctataacttccacgtgccgctctcggacggcggcgtgctgctgggcgccagcccggagttgctgctgcgtaaagaaggcgcgcatttcagctctctgccgctggccggttcggcccgtcgccagccggacgatgtgctggaccgcgaagcggggcacaggctgctggcatcggaaaaagaccgccacgaacatgagctggtgacccaggcgatgaaggccgtattagcgccgcgcagcagcgaactctccctgccggactctccgcagctgatcaccacgccgaccctgtggcatctggcgacgcagattcagggcaccgcgctggcaaatgagaacgccatgtcgctggcctgcctgctgcacccgacgccggcgctgagcggcttcccgcatcaggcggcgaaacgcctgattaacgaactggagccgttcgaccgtcagctgttcggcggcattgtcggctggtgcgatgatgaaggcaacggcgagtgggtggtgaccatccgctgcgcgcgcctgcagcagcgcaccctgcggctatttgctggcgcaggtatcgtcccggcctcttcgccgctaggcgagtggcgcgaaaccggcgtcaaactgaccaccatgctgaacgtattcggcttgcaataagggactatgatgatcgaatttacccgctggccagaagagtttgcggcccgctatcggcaaaaaggttactggcaggatctgccgctaacctatctgattacccgtcatgcggaaaacgacgctcccgcgattatcgacggcgacaaaagctacagctaccgtgaattcaaccgcctggtggataacctcgcctcctcgctgcagcgtcagggcctgaagcgcggcgaaacggcgctggtgcagctgggcaacgttgcggaattttatatcacctttttcgcgctgctgcggatcggcgttgcgccggtcaacgcgctgttcagccaccagcgtagcgagctgaacgcctacgccgcgcagattgaacccgctttgctgattgccgaccgcgaacacgcgctgtttgccgatgatgattttcttaacgcttttgtcgcccagcatgcgtcggtacgcgtggccctgctgctgaacgacggcggcgaacgcagcctggcggcggccatcgcccagcctgacgataatttcgtcgcgcatccgacgcccgctgacgaagtggcttttttccagctctccggcggcagcaccggtacgccgaagctcattccgcgtactcataacgactacgaatacagcattcgccgcagcaatcagctgtgcggcgtaagcgccgaaacgcgctatctgaacgcgcttcccgccgcccacaactacgcgatgagctcgccgggttcactcggcgtcttcctcgccggcggcgtggtggtgctggcgcacgacccgagcgccaccctctgcttcccgctgatcgaaaagcaccagattaacctgacctcgctggttccgccggcggtaagcctgtggttacaggagatccatgagtccggcagcaatgcccgtctgcagtcgctgcggctgctgcaggtaggtggggcgcgcctgtccgcgaccctcgccgcgcgtattccggcggaaatcggctgtcagcttcagcaggtcttcggcatggcggaggggctggtgaactatacccgcctcaacgacagccccgagcgcattatcaatacccagggctgcccgatgtgtcctgatgacgaagtgtgggtggccgatgcgcagggtaatccgctgccgcgcggcgaagtcgggcgcctgatgacccgtggcccttataccttccgcgggtactacaagagcccgcagcataatgccgaggcctttgatgccgatggtttctactgctctggcgatctgatctcgatcgatgaagatggctatatcaccgtgcaggggcgggaaaaagatcagatcaaccgcggcggcgagaagatcgcggcggaagagatcgaaaacctgctgctgcgccatccggcggtgatccacgtcgcgctggtcagcatggaagatagcctgctgggggaaaagagctgcgcatatctggtggtaaaagagcctctgcgcgcggtggcggtacgccgcttcctgcgggaacaaggggtcgcagaatttaaactgccggaccgcgtggagtgcgttgatgcgctgccgctgacgccggtgggcaaagtcgataaaaaacaattacgtcagtggctggctgaacgcaagctgggctgaaggagaagacagaatggcaatcccaaaattacaggcttacgcgctgccggaagccagcgatatcccggcgaacaaagtgaactgggcatttgagccgtcccgtgccgcgctgttgatccacgatatgcaggagtatttccttaacttctggggcgaaaacagcgcgatgatggagaaagtggtggccaacatcgccgccctgcgcgagttctgcaaacagaaccatattccggttttttacaccgcccagccgaaagagcagagcgatgaagaccgcgcgctgctgaacgacatgtgggggcctggcctgacccgttcgccggagcagcagcaggtgattgccgcgcttgcgccggacgacaacgataccgtgctggtgaagtggcgctacagcgcgtttcatcgctcgccgctggaggagatgctgaaagacgcggggcgcgatcagctaatcatcaccggcgtatatgcccatatcggctgcatgaccactgcgaccgatgcgtttatgcgcgatattaagccgttcttcgttgccgacgcgctggccgatttcagccgcgaggagcacctgatggcgctcaactacgtggcgggtcgctccggtcgagtggtgatgaccgaagagctgctgccgctgccggcatcgaaagcggcgctgcgggcgctggtgctgccgctgctggatgaatccgacgaaccgatggatgacgaaaacctgatcgactacggcctggattcggtacgcatgatggcgctcgccgcccgctggcgtaaagtgcacggcgatatcgacttcgtggtgctggcgaaaaatccgaccattgatgcctggtgggcgctgctttcccgcgaggtgaaataatgaacgggctcgattttcacggccggaccgtgtggatcaccggcgcgggcaaggggatcggctacgccaccgccctggcgttcgttgaggccggcgcgcaggtaaccgggtttgatttggcgttcgacggcgaaagctacccgttcgccaccgagacgctggacgttgccgacgcgcagcaggtggcgcagacgtgcggccgcctgctggcagggatcgcgcggctggatgtgctggtcaatgccgccggtattttgcggatgggggcgaccgatgcgctgagccaggaagattggcagcagacctttgccgttaacgttggcggggcgtttaacctgttccagcagacgatggggcagttccgccgccaaaaaggcggggcgattgtgaccgtggcgtccgacgctgcgcatacgccgcgcattggcatgagcgcctacggcgcgtcaaaggcggcgctgaagagcctggcgctgaccgtcgggctggagctggcgggcagcggcgtacgctgtaatctggtttctcctggctctaccgataccgatatgcagcggacgctgtgggtgagcgatgacgctgagcagcagcgcattcgcggcttcggcgagcagtttaagttgggcattccgctgggcaaaatcgcccgcccgcaggagattgccaataccattctgttcctcgcctccgaccacgccagccatatcacgctgcaggatatcgtggtggacggcggctcgacgctgggggcataaatggcctggaaacgtcagctgacgctggatgaactcaacgcgaccagcgtcaatacgatggtcgcgcatctgggcatcgtttatacccggcttgaggagggcgtgctggaagcggaaatgccggtcgacgcgcgaacccatcagccgttcgggctgctgcacggcggcgcctccgcggcgctggcggaaaccctgggctcgatggccgggtggctgatgaccgaagagggacagtgcgtagtggggaccgagctcaacgccacccatcaccgggcggtctccagcggcaaagtccgcggcgaatgccgggcgctgcacctggggcgtcagggccagagctgggaaattgcggtgttcgacgagcggggacgacgctgctgcacctgccgtctgggcacggcggtcctcggctgaggcatagcctgttcccgggtcgcgctgcgcttacccgggctacgggtaacgcgccgtctgtggttccggccaactcaccgtcgtctgcggtgtgcttccccggtggcgctgcgcttacccgggctacgggttcatcatcgtctgcgggccggtagcccgggtaaggcgtttacgccgcaacccggggatacgccgggatgaatgcatcggtgcggcttcttcctgggtcgcgctgcgcttacccgggctacgggttcatcatcgtctgcggaccggtagcccggacaggcgcgtcaagcgccgcctccggggaagcaggatgcgatgcagtgagagattatccctccccgttttcatccattttcctgccagaagtgatctcgcttgcaatgtgagataaatccttgccgtcaggcgacatctgcaacgtttcaaagttgttaaaacttccattgtgttctagaaacaacttgtaacatcctgattaccctacctgtggaacacaatgatgaataattcagggaaatacctcatctggacactgctctccgttatcggagcctttgccctgggctatatcgcgctaaaccggggtgaacagattaacgcgctgtggattgtcgtcgcggcagtctgcgtctatctgatcgcctatcgcttttacggcctgtatatcgctaaaaacgtgctggctgtcgacccgacgcgcatgactccggcggtgcgtcacaacgacggcctcgactacgttccaaccgacaagaaagtgctgttcggtcaccattttgcggccattgccggcgcggggccgctggttggtccggtgctggcggcgcagatgggctatctgccgggaatgatctggatcctcgcgggcgtggtgctggccggagcggtacaggactttatggtgctgttcgtctccacccgtcgcgacggacgttcgctcggcgagctggtgaaagaggagatgggcccgaccgccggggtactggcgctggtggcctgctttatgatcatggtgattatcctcgcggtactggcgatgatcgtggtgaaagcgctgacccacagcccgtggggcacttacaccgtggcctttaccatcccgctggcgattttcatggggatctatattcgctatctgcgccccgggcgcattggcgaggtgtcggtgattggcctggtgatgctggtgttcgccatcatttccggcggctgggtggcggaaagcccgacctgggcgccgtggtttgactacaccggcgtacagctcacctggattctggtgggctacgggtttatcgccgcggtgctgccggtctggctgctgctggcgcctcgcgactacctctccaccttcctgaaaatcggcaccattgtcggtctggcgattggtattctgattatgcgcccgacgctgacgatgccggcgctgaccaaatttatcgatggcaccgggccagtatggagcggcagcctgttcccgttcctgtttatcaccatcgcctgcggcgcggtttccggcttccatgccctgattgcctccggcacgacgccgaagatgctggctaatgaaggccaggcctgctttatcggctacggcggcatgctgatggagtccttcgtggcgattatggcgctggtggcggcctgtattatcgacccgggcgtctacttcgcgatgaacagcccaatggcggtgctggccccggcgggcgtgaccgatgtggtggcgtcggcggcgcaggtggtgagcagctggggctttaccgtaaccccggatacgcttaatcagattgcgaccgaagtgggggaacagtcgattatctcccgtgcgggcggcgcgccgacgctggcggtgggcatggcctatattctgcacggttcgctgggcggcctgatggacgtctccttctggtatcacttcgcgattctgttcgaggcgctgtttatcctgaccgcggtggatgccggcacgcgcgcggcgcgctttatgctgcaggatctgctcggggtgattagcccgggcctgaagcaaaccagctcgctgccggcgaaccttctcgccacggcgctgtgcgtgctggcgtggggctacttcctgcatcagggcgtggttgacccgcttggcggcatcaacacgctgtggccgctgtttggtattgccaaccagatgctggcggggatggcgctgatgctctgcgcggtggtactgtttaagatgaagcgccagcgctatgcctgggttgcgctgctgccgacctcctggctgctgatctgtaccctgaccgcgggctggcagaagtcgttcagcaccgataccaaagtgggcttcctggcgattgccaacaagttccaggcgatgattgacagcggcaatattccgccgcagtacaccgagtcgcagctggcgcagctggtatttaacaaccgtctggatgccgggctgaccatcttctttatggtggtggtggtcgtgctggcgctgttctcgattaagaccgcgctggcggcgctgaaagaggacaaaccgacggcgaaagagaccccttaccaggcgatgcctgctgatgctgatagcctggtgacccaggcgaaacgcgcccactaagccatgacgttatcgccctcctttgcgagaaggggggcgatgatgggagttgaaaatgtttgataccctttcgaaagccggaaaatatttaggccaggcggcgaaaatgatgatcggcgtcccggattacgacaactacgtggagcacatccgcgcgacccatccggaacaaacgccgatgacctatgaagaatttttccgcgaacgtcaggacgcgcgctacggcggtaaaggcggcgcgaagtgctgttaaccctctttcggcagatacaggctgatctgctcctgggtgcagccgtatattgccgccagcttttcgcgggtgcgcttttgcgggcgggaatcgatagcttctagctgggataccgccgactggctaatcccgagcttattggccacctcctgctgcgacaggccgcgcaaaatgcgccaggccgcctgcaggctgactttctctttatccatgatgtcgcagacgtcacccggcagcatcacgttgtcgtagatatcgtgttctaccggaatatcttcaagatcggcttccgtttcatcatccagctcggctagctgcaaacacatctggaagtattcgtcgtaggggatcaccgcgtactgcgctttcccttcatcatccttaattatctgaacagccatatggcatattctcctcatgcaaataggttgttgaggttctgcgcttaacggacacgataaacaggtcgctcagcgtcagcccctgacatgtgaaaatgaaccgataatcccctacccgaagacggtaatgattctctggtttagataactttctgacatcgggccgaggagccgtacggtcacctaaatcagctagcctgcttttgattctctgctgatagcgataatcgatatttgccagttccttttttgccacttttgaccagatgagcatgctatgtacctccactgtacacctcagttgaacataagaaaataataagtttataagataagtttgttattttcttatgagggtaccctaacgcagaatcgtcttctggcgaaggcagaaacatcggctttgcgaggcggctcgaaagcgcctccgccgggcggcagaggcgaataaaacgggggattaaccggcgaaacgttcgaccttctcaaacgccgcgcgcagggtttcagcgttcagttcaaccggcagaaaatggatggactccaccgggcgcagggtatgggcaatcaccttatccagctgttcgcggttgttgatgtccacctccagcgccgccagcgtagtcggcagattaaagcgccggtacgcctgcaccagctgcgccagcacgtcgtcctggccgagcagggcgctctggaccagaatgccgtaggcgactttggtcccgtgaagatacttctcggtctgcggcagtaccgtcagcccgttgtgcaccgcgtgggcggcggcgacgcgggtatagcgctcgcccagcccgccgaccataccgccgccggcgataaccgcatccaccacgtcgcgaaacgcctgggtcagctcgccgcgctgctggtcggccagcgcggtttcgctgctttccagcagaacatcgcggatcgccagcgcgccgttgatacccaggcgcacggtgagcggcagcgtctccggctgcggagccagcaccaccgcttcataccatttcgccagcgtatcgccgatgcccgccagcagatattccgccggcgcgttaagaataatgtgcggctccaccagcaccagaaagttggcgtcgtcgaagatttcaaactgcagcgcctgaccggcatcgttataccacaccgacagcggcgtccacgccgcgcaggtggcggcgatggtggggatggccaccaccggcaggccgaggcgacgggccagcgccttcgcggtatcgagcagcgcgccgccgcccacgccaatcaccaccgaccgatcgtcgccggatgcgcgggccagctcgctgacgtcgctttcgctgcagtggcctttaaataatatttttttggcgccaggcgcgttaaacgctgccggcaggaaagcctgcgcgcccgcgatagcccgctcgccgtaaacccacaccgcgcgtgaaagctgttcttcgctgtaaaaatcctgcagccgggcaaggctgccgggatgggaatagtagttggcggggccggggaccacgcggatatcgctgtgactcatcaatgctgtccttgtgctgtttcgctaacctgatgttatgtctggacatccggatggctaatattatttcgctttatcttatgccttttatgcatttgtcagtcaaggagagctatgaaaaattcgttaaatcagaacattaatcgacagggtgcaggggatgaccggcaatcgccttgagatgcaaaatattagcctggccttttccggctttcgggcgctcagcaacgtggctttcaccctgacggggggatcggtgcatgcgctgaccggcgccaacggcgcgggtaagtccacgctcatggcggtgctgtgcggcacgcacgcccattacgaaggcgaggtggtgattaacaaccagtcggtaagtattcgctcgccgcgcgatgccaaacagctggggatccatctggtgcagcaggaggttgacgtggcgctggtcccgggcctgagcatcgcggaaaacatcatgctcgacaggctggcggagccggggatcgccttccgctgggggcggctgcgccagctggcgcgcgaggcgctggctcagcttgacgtcagcctcgacgtacgccgctccatcgacagctgtacgctggcggaaaaacagcaaatcctgctggcccgcgcgctgtcgcatcactgccgctttcttatcctcgatgaaccgaccgcgccgctggaccaaaacgaaagcgagcgcctgtttgcggtggttcgccgtctgcagcggcagggcattggtatcgtgtttatctcgcaccgcattcatgaattaaaagcggtctgcgacaccctgacggtgctgcgcgacggacggctgattgagagcgggccgatggccgatctgagcggcgagcagatcgtcgagaagatgctcgggcatgagctgagcgatatctttccgccgaagcggccgccgcatagcgatgaggtgctgctacaggttgaagggctgcacgacgaagggctgctgcaggatatctcgttgcgtctgcgcaagggggagattctggggatcgccgggctggcgggcgccgggaaaaccgagctgtgcaaggcgctgtttggcgccagcaaaagccgtttgacccgcggcgaactgaacagccagccgtggcgaccgcgcgacccggcggactcggtggcgcgcggtctggcgctggtgccggaagagcggcgcaaagagggcatttttatcgaagagccggtggcgatgaacctggcggtcagcgccgatagcagcttctcccgctggagcctgtttggccatcgtcaggcctggcgctgggcggaagaggtgatcgcccgggtgggcattcggacatcgggtccggcgcaaaccctgcgccgtctctccggcggcaatcagcaaaaagtggcgataggcaaatggctgcgcggcaacgccaacgtcctgattttcgatgagccgaccaaaggggtcgacgtcaaagccaaaacggatttattcaacgcgatcgacggcctggcgcgggaaggcaaaggggtgatttacgcctcgggcgagttcgccgaactggtcggcctgtgcgatcgcatctgcgtgctgtgggacgggcgcatcgtggcggaaattccgggcgcagaggcccgggaagagaacattctttattactccaccggaggagcagcagcgtgagtaaggccctggcagttaacgcgacggtatcgggccgtcagcgatttttcgattttctctacaaatggggcatgttgctgaccgtcgtcctgctgatcgccgtttttggcctggcgtcggacaacttcctcgacccgtttaacatcatcaacatcctgcgttccatcgccatcgtgacggtgatcgccatcggcgtatcgatatcgctgaccatcggcggtttcgatttatccgtgggctccaccgcctcgctggccaatgcgctggtgatttcgctgtttgtctggcacggcttcggcaccaccgaggcgatccttatcaccctcgcgctctgtaccttagtggggctgttcaacgcgtttctgatcgtgatcctgcgtattcccgacatgctggcgacgcttgccagcctgttcgtgattcagggcgtggcgatgacctacagctacggcgggtcgatcaccgaaaacatggtgctgccgagcggcgatatggcggaaggcgtgattccggcggcgttcggttcgctggggcaggtgccaacgatagtgatcattatgctggtggtgaccgttatcgctcagctggcgctctcttttaccacccacggacggcggatgtacgccatcggcggcaacccggaagcggcgcgcctctccggcctgcgcattacccgttacaaagtggcggcgtacgtcatcgcctctctgctggcggggctcggcggcattctgctggcgtcgcgcatcggctcatcgcaggtgaacgccggcggcggctacctgatggatgcggtggcggcggcgtggattggcttctcgctggccggttccggtaagccgaacgcgctcggtacgctggtgggggcggtaattctgggcgtgctctccaacggcctggtgatgctctcggtgccctattacgcgatggacattattaaagggctggtgctggctggcgcgctcgcactgacctattttcagcgccgcatctaatattttacacgtcattcttcaaattgcaggtgtgttggctgcgttcactcacccgaatcacatacttatgtaagctcatcgggattcgtttacttgccgccgtcctgcaattcgaattatttagggtaacaaaaaggaaacactatgaaaaagataacgttttcactcatcgcgctggggttgttcaacgctgcggcggcctttgctgaaaccccgacgccgcttccggctgccattgctgaacacagcgggccgattcgcattgcggtgatccgcaacctgggctccgacgataacaccactcagtttgtctccggagcgatccaggaggggaaaaagctcggctttaaaatcagtaccttcctcagcaacggtgatgacgccaaattccaggacttcgttaaccaggcgattagccagaaatacgacggcattatcctttctcaggggcgcgatccctacgccaccgcgctggtgaaaaaagcggtggacgccgggatcaaagtctcggtcttcgataccgcggtaaacggccagatcccgggcgtcaccgtcacccagcaggatgatgcttcgctgaccgagctctcctttggccagctggtgaaagatttcaacggcaaagccaatatcgtcaaactgtgggtcgcgggtttcccgccgatggagcgccgccaggcggcctaccagacgctgcttaaacaaaaccccggcatcaaagagctggaatccatcggcgcggtctcttccgacgtgcagggcgataccgccaacaaggtcggcgcgatcctggcgaaatacccgaaaggtaaaattgatgccatctggggaacctgggacgcgttcagccagggcgcctataaagcgctgaaagagaacggccgcactgagatcaaactctacagcatcgatatttccaatcaggatctgcagctgatgcgcgaatccggcagcccgtggaaggtgagcgtagcggtggatccgaagcttatcggcgctaccaacgtgcggctgatcgccaataagattgccggggaaccgacgcctgcgacctacgactttaaggcggcggcgatcccgcaggcgctgctggcggcgcagccgggggcggttaacgtcgcttcgctgggtaaaattatcccgggctggggccagaccgaagactttatcgctccgtggttcgctaccctggaagcgaaaaacaaatgagtgttttgccaacaccagaatacagccgcaatatgcggctgatcgggcatagcgatcagggaggacgcccggacggcgttcagctgatggtccatcgtggttttgcctatatcggccatatggtctcgcagggcttttccgtggtggacgtgcgcgaccctaaacatccgcaaacggtcaactacatcgccgcgccgcccggtacctggaacgtccatttacaggcgcacgacgatctgctgctggtgatcaacgcccgggatctgttcgccgatgcccgcttcgccgacgagaaggtgtactacacccgttcggtgggcgagacggtcagcgacgtacgggataggggctggagcgccgggctgcggatttttgatatttccactccggataaaccgcgagagatcgcttttctgtcgcttaacggcatcggtatccaccgaatctggtacgtcggcggacgctgggcctacgtttccgcgctgattgacggctttagcgactacattttcctgactatcgacctggccgacccgcgcaagccggaggtcgccgggcgctggtggctgccggggatgaaccaggcggcgggggagaccgcgcagtggccggaaggtaagcgctatgccctgcatcacgcgattatcgccggcgacaccgcctacggtagctggcgcgacggcggcctgaccctgctcgatgtgcaggaccgcactcagccgaagctgattagccaccgtaactggagcccgccgtttggcggcggcacccacaccgcgctgccgctcccggatcgggatctgctggtggtgcttgatgaggcggtgctggataaccagcaggatggcgagaagctgatctggctgttcgacattcgcgacccgacgaatccggtgagtatcgccactttcccgcagccggacgaagctgactacgtggcgaaaggggcgcactttggcccgcataacctgcatgagaatcgtcccggcagctttgtcagctcaacgctgattttcgccacttatcagaacgcgggcgttcgcgcttacgatatttccaacccttatcgaccggtggaaaccggggcgctggtgcccgccgcgccggcgaaaatgatggatacccgccccggtcgcccgcgggtgatccagtcctgcgacgtgttcgtcgacgcgcagggaattatttacagcaccgattataacggcgggctgtcggtgattgagtatctggggtaggggattgtgggttgttgccttcccgggtcgcggcgtaaacgccttacccgggctaccggatcgcagatggtggcgaacccgtagcccggacagatgcgaagcatcgcctccggggaaagaggcacatacccggaggcggcgcttgacgcgccttacccgggctaccggattgcagacggtggcgaacccgtagcccggacagatgcgaagcatcgcctccggggaaagaggcacatacccggaggcggcgcttgacgcgcctgtccgggctacctgatcccagacggtggtgaactcgtagcccggctaagcgcagcgcgagccgggaaaggctggacggagattcaaccgtactggcgaattcgcgcaatcagctcatccacgctgtcgatgcgatcggcaatcacaatcagcgctttacccagggtgatggcgtggcgcaggcattcatggcgcatggcttcgtcctggatagtatcgatatccgccacgtgcgacagcccgacgctgcggcgaatcagttcggtgccgcagaagcccaccgcgtcggcccacactttcttcaggaacgcggaggcatagccgggccaggccagcgcggcgtcgcgggatctctccgccgccagcgcctgaaaacgctcggcaaaggtggtccagaactgctggatatcgctgaggcgctgttcgcgagcggcggcggcatcgcgaatgcccagatgccccggcagaccgcaatagttgagcagcaggttgccgatggcggtgccgatatcgaagccaatagggccgaaaaagccgaattcggcgtcgatggccttaaagctgccttcggcgacgaaaatcgagccgctgtggatatcgccgtgcagcagcgcttcggcatgggaaaagaagcgatgcttgagcgcggccaccgccagcttcagctgggcatcgtcgcgcagggcggcgacatcggcttccagcgcggctggatagctgttgcgctcgtgaacctgatacgggtcgttaaagaacagatcctcggtgatttcgcacatctcgggattaataaattgcgccacctgggcctttttctcatgaggatgcagataaaagtcgctggtgtgaaacagcgtctgggccaggtattcccccagctggctggcggcctgggggtagtaaacgttgttgatcagctccccgcgccagatgcggtgatcggagagatcttccatcaccatcaccgccagctcgggatcgaaatgcacaatccgcaccgtgtgttgcgggcagtgctgatagtgagccaccagggtttgtgcttcaaggcgcgcgcggtcaagggtcagcggccaggattctcccacgcagcgcacgtagggcagcgcctgcttaacgataatccggctcacgcccctgatatcgaaaattttaaacaccaggttgaggttgccgtcgcccacttcctgcgcggacaccagttctgacggattgtcgataccgccaaattgttgggcgtaagccaccgcatcgctggccgtgaaagtatggtattgcgacattgcctcgatcctcaaaattctgattaagccgttcagacgtctatacttctggatttcatcctgacacaatgtgatacaacaacgcaacagggatttaactaaatgcagacactacagaccaccagcctgcgggtaagcgaaaatcagctctttattcttgaccagcaggctttaccgcaggaaaaacgctggctggcggcggataacgtggcgctgctggtggaccatattcacgccctgcgggtacgcggcgcgccgctgattggcctgtcggccagcctgctgctggcgctgctggcgcagcgcggcctgacccgcgaggcgctatctgaggcgctggagacgctgcgcgccgcgcgtccgacggcggtaaacctgatgaataatctggatcgcatgaagctggcgctggcggaggagcgctttccacaggctctggaagcggaagcgctgcgcctgatcgaagaggataaacagctttgcgccagcatcgccgaggcgggcagcgcgctggtgacgccgggcagccgcctgttgacccactgcaataccggcggcctggcgacggcgggcgtcggcaccgcgctgggggtgattgcgctggcgcatcagcagggaaaggtggcgaacgtctgggtggatgaaacgcgcccgctgttacagggcggacgtttgaccgcctgggagctgggtgaactgggcgtgccgtatcggctgattaccgattcgatggccgccagcctgatggcgcagggccaggtcgacgcggtttgggtgggcgctgaccgtattgccgccaacggcgatgtggcaaataaaatcggcacctattcgctggcggtgctggcgaagtaccatcagattcccttttacgtggccgcgccacagactaccctggaccgccattgcccgaacggcgcggcaatcccgattgagcagagggcggccgccgaagtcaccggcgtcgccggcagctttggcgcggtgcagtgggcgccgaaagaggccgccgtttataatccggcgtttgacgtcacgcccgcggcgttagtgagcggctgggtgctggacagcggcgtggtgaacccggagcaggtcgccgccggggcgtttgcgccagaaaaggcctgaacctgagcaaaaaggcgaagcgatctccctcgcttcgccttcaacttatggcagcaccatctctaccgccggagcggactgcgggtcgatattacggccaagcgccgtcagcgccgcctggtacgggcacagcgtcccgacggcggtggtccggcagcccgcctgatgccactcctggcgcagcagcggatgctggctatccggcgtttgcaggcggcgtaaatcgtccagactttgcgcctggaagtagacgcgcaggtagcgttttccgctatgggtgtcgcgccagcgttccagtaccaggctgctgcccggcgggatattgccgcggctgtaccccggcagctgccagctaaagtccattaacgtccgcaccatggcgatattggtatcgtgcgccaccagcagcagccagcgcacgttcggcgcggcgccctcttttaccccttcgagcatggcgttgagcagaatcgagccgcgtttttgcgcggtataaaacacatcgttgctcagatcgtagttctccgtcagcagcggcagcagggcggtgacctggctggcgcgggtaatattgccccacgccagctggctgagaggcaggttctcgctccagcccagacgcagcgtctcaaccatattggccatcacgctcagcccgctaatcgacgttttgccgcttttgctctgctccacctgccacggcaggtcaaataccgggcagggcttatcgggcgcgcagacggcgtttttcagcagctgaatcaccggagccagcgcctgccgacgctgcgccagatcgccggccgtcttcttcacttccgccagctggcgggcgggatcggtttgcgtggcggcaaatttatcggtctgaaacagcgggtcggcgtcgccgctgacgtgatgaatcatcacgccgcagccgggaaaggcgccgtccaccagcgcctgggcggtggcccgcgtgcgctgcagggggctggcgcgcacgtaaatttctccgctcgccggacagcccgccgcgagcagtccgagctgacgatagcgtgcgccttcatcgcgacctttattgacgacggcggcgtagccgtggccggtcagctccccgtcgtgggtggtccactgcgtccacggacgctgggtcgcggcttcgatagcctcccggttgccctccgtcggcggacgaattccgtggcggctgagctcaaccactttttccagcgtaaactgcgcggcggcgtggcccggcgcggccagcagcggcagggcgcaggcgagcagcaggcgtagcaaaacctgatgtcgtacgggcatcataaaatcttccttataagttaaacggttatgacgagaatgaggtctgacgctctatcgcgtgtcgcctggcgacaatcgcggcggtggtaaaacagaatagcgcggacatcaggccggtgcctacccaaaacagcgatagcgtactgaagtcatacagcgttttgccattttcgattatcgatgttttatcgatgatgatgccggtcagaaactcgccgagtcccgcccccgcgtagctggcgataccgatggtgccgagcgcggcgcccgcggctttacgggacgaaatatcgacggcgatcagtccgccaaggaagcaggtcaacgccccgatggtagcgccgaagataatcatcgccagaatatcggtgtagtagccgtgcggcgaccagagcatcagcgcgaagccggcggtgttgagcaggctgataaaaccggccatcacgctgcggttgcgcgggaagaagcggtcggagagcatcccggcgataatcgttccggcaatacccgcgatagcgttgaccccgataatcccggacgcttcgagggtagagtaggctttatcctgctccaggaagaagatcccccatgagttcaccgcgtagcggtcgatatacataaacgccgaggccagcgccagcgcccacagggccgggttgcgcagcgccagcagctggtttttaaacaccgagccgcgggcttccgtctcctccagcggttcgtcgcgaatcacgttgattgacgggaagccgcagctttgcggcgagtcgcgcataaacaacagcatcagcaccaccccggcggcgccgagcgcggcggtcgacagatagcccatctgccagccgaatccggcaatcaccgccgcgatcaccatataggtcatcgcttcgccgatgttatgcgccgtcgaccagatggcgtaaaaagtgcctcgctctttacagccgtaccagcgcgccagcgataccacgcacgggccgacgcccatcgactgcgcccagccgttaatcccccagaagatagccagcagcatggcgttgctggtcatccccatcatcaggttcatcccggcgctcagcagcagcccaaggctcatatagcgcaccacgttggcatgatcggcgataaagccgttgaccagcttgccgatggcgtagctgaaaaacagcgttgagccgatcatgcccagctccgtcggggtaatgccgagctccaccagcgcgcttttggcgacggtgaacgacagccggcaaacgtagaacgtgacgtacgccagagtcatggtaataaaggtttgccagcgcacgctgcgaaagcgccgctcatcgaactcgccgcccgctttgggcggcgaagcgcgaaaaaatgcgataattcttccagacataatggtatctccgaaggtcggaggcctgactgattagtgtggttcgtccatgaggtttaacccgtcatacttcaagttgcatatgcgttggctgcgttcgttcaccccagtcacttaccagagtaagctcctggggattaatgagaggctcctgcctctcaccggaggccagccttcggctggtcaaattcgttcccgacgaatttgtcgctcacttgccgcctttctgcaactcgaattatttagggttgattgtcgttgtgtagagtacataatcagataaagcctgacccgatgcggttaaggtaatgggtgacaaagcatgttttttaattgtggatagagcgtcttgctggccagcagcagcggattaccgtgacgaatcccgtcgtttgccagatagtcgttgctgaggccgcccgcttcgcgcatcagcaccagccccggcagcccgtcccaggggttcatatgcggttcgtagtagccgataagcctgcccgccgccgcccaggcgctcatcagcgccccggagccgttgcggataaacatcccgccgtcgctcagcagcgcatcgaggaagggcagaaagaccgcaggcgtcacgcggtgcgaggtgccgacgcccatcacgccctctttgaccgtcgctgccggatgcggcgcgataggcgcatcgttaagccacgcgccctggcctttcagggcgtggaacagctcgcgatggttggggtcgtacaccacgccgataaccggttcgccgtcggctatgatggccagcgacaggcaccaggtgtgcaggccgttaagaaaacagctggtgccgtcgatgggatcgacaacccacagcacgcgggcgtccggcatctgcgtcccgctctcttcgccgagaaaaccgtcctgcgggaaggcgtcagtaatgcgctgcttaacaaacgcttcgacccgcttatcggcgacgctgaccacgtcctgcagatcgtcgcctttatgatccaccgtcagccggtcgcgctgttgatagtattcgaacgccagttcagcggcggccttcgccagctcgcaggctaaacggtagcgggcctgcagttcatttgattccagtgatttcatcataactccctattttgcacacgtgtgcaaattgcctgaaaaaaacggccccgaagggcaaaatgagtgtggatggattaaaaatattattctgtgatcgctccggcataaaatgaatttttcatttcgcactttgacgaacgatcagtttcaccggcacttcgcgatggcgtgacggcaggctgaatttggcgatccgcgtgaccagcagatccaccgcgtggtgggcgagcagggcggtattctgctgcacggtagtcagctgatagggctgccagtccgcctggggaatatcatcgaagccgataatcgccggtagcgaagcggcggggttgtccgcccgcaggccgtccagcgcgccgagcgccagcatatcggtggcgcagaacagcgcctgcagctgcggatgcgcggcaagcagctgcctggcggcggcaaagcccgcctgatagccgctgctgtcgcagaagtgcgcggcgacctccatgccctgagtatgggcaacaaacgcttcgtagcgctggcgggtgctgaagttatccaggctttcgccgataaacccggcctggcgccactggcgctgggcaaacaggtcggccaccagcttcgcgccctgcgcgttgtcgctgcacacgcgatcgcagccggccagctcggcgtggcggttgataagggtcaccgggatttttcgctccagatactcctccgccagcgacagcggcggcgccccggaggtgataataacccccgcgacgtgatagctcagcagctgcctgagagacggggcgagctgctgcggatcgtcggcgttcatcagcagcggcataaaaccgttgagcgccagctggtggaccagcggcgacagcagcttgctgcggaaggggttatcaaagccggcggtgacgatgccgataaaattgctgctgccggtattcatcgtgcgggcgataatgttgacctgatagcccagcgtttccgccgcggcgaggaccttctggcgggttttttccgccaccgatgcgccgggcgtaaaggtgcgggaaaccgcggaacgtgagacgccagcgagtcgggcaacgtcctctgccttaatccattttttttcgctcatagtatcagggtacgggttatcctcagtgagcccgcgccgacgcaggaacccatggccggcacggaaaaagtcgttaaaaggtaccacataaatccccgggcgagcagtgggttgacgcggcatcgcggccgcgtcaacgtcaggcttatgccggatagcgaatctgctccgcctggcgctgcaaaataactttgccgtgacgaatggaggtcagcactttggcctggcggcgcagcgcgtcgtagtcgttttccgcatcgaggatcagcaggtttgccgggcgtccttcggcaatgccgtagttgtcgccgaggcacagggtgcgggcgctgttatcggtaatcagatcgaggcagcgctgcaaatcttcgtatcccagcatatggcagatatgcagcccggcgtcgaggatgcgcatgatgttgccgttgcccagcgggtaccacggatcctgaatggagtcctgggcaaagcagacgttgatcccggcgcggtccagctccgccacccgcgtcacgccgcggcgtttaggccagctgtcgaagcgcccctgcaggtgaatgctttcggtcgggcaggagataaaattgatgccagacgctttgagcagacggaacagcttcgagcagtaggcattgtcgtaggagcccatggcgcaggtatggctggcggtgacctgcgcgcccatgccgcgcacccgggcctcttccgccagcacctccagaaagcgcgactgcgggtcgtcggtttcatcgcagtgcacgtccaccaggcagccgtggcgctgggccaggtccatcagaaaaaccagcgagctgacgcccttatcgcgggtgttttcgtagtgcggaatgccgcccaccacgtcggcgcccatttcgatggcgcgggtcatcagttcgcgtccgccggggaaggactcaatgccctcctgcgggaaggcgacgatctgcagatcgataagatgggccgcttcttttttcactctcagcatcgcctcaagcgccgtcagggaagggtcggtgacatcaatgtgggtgcgcacgtgctgcacgccgttgtcgcgcagcatgccgatggttttcagcgcccgctggcatgtatcttcgacggtgacgctcgctttgcgctggctccagcgggcgatgccctcaaacagggtaccgctcatattccactccggctcgcccgccgtcagggtggcgtcaagatggatatgcggttcgacgaacggcgggatgaccagcttttgctcagcatcgatatcgtcggcgtcagccgcctgcgccgcggcctgcgcggtgatgcttttaatcacgccgtcctgtaagtcgagggtatagagcgcttcttgatggcgcaggcgcgcgttgataattttcatggttgttcccgtaaatggttttgcgacatacgccagatcgctaaggcgaccgaggcgttgagatgaaactgcgggtggctgaccggatagccggtcagcttctcaatacgctgaatgcgttgatgcaacgtgttgcggtgaatgcccagccgctcggcggctctgaccacgttgccgctctcctgaagcagcgtttccagggtctccatcagcagccaggggcttttgcgatccggctcaatcagacagccgagggtgtcgtgcataaagtcgctcagcagggcggggtcgctaacggcggagagcagcttgataaaccccagctgctggtagtcgctgatgcgctgggccggacgcaggttatcgctgaggtccagcgcctgacgcgcctgcgacagcgcgcgctgatatccctgcagctgctgcaccggcgccgaaaggccgcacagcagcgatagcccgtcgtcgccctccgccagtgcgatcagccacgcctggagccacgttttttgctgataaaattcgccttcctcatccggaagcagaaagagaaacatattgctgcgctcgaccagcggaaagggattaccctgctgattgagctgctgctgcagccgctggcgtatggtgcggcgggcctgctgcagccaggcttcggcctgctccggcggaaactggcgaaacaggcgcgggatcccctcaaggcgcagcgccgccacccgcagcgggcgggtaaaatccagctgctggtggagcgcccgctgatgcaggatttgcaggtcgggatagtcgccggttaacagctgcagcagaatatcgcgctgcgattgcagggcgttttcgctgcgcaccagcgcggtaccgatgcgttcggtcacgatcaccattttcagcagatagggctgttcgatcagcggaatgcccagctcgtcggccagcgcaatcaggcgcggcgagatcgcctgaatgtacgcgtcgccggtgaggatcaccatgccggcgatcccgcgctgcttgccctccatcagcaaatggatcaggttttcttcatcgcggggatggttgatcccggtgataaacaccagctccccgcccatgatccattcggcgatattttcattttccgccacgtagtaccagcgaaccgccagctgcagcccctgcttaccggcgcgcaggcgcatggcggagagcccctccagggcgaggatttcgctgaccgtcaggctcacggctactgctccgcgaccgaatcagcggcgggctgacgtttgctcagacgcgtcagcgcgatatagaccagcgcggaaacggtaatgccaaccagcggggcgatccacggtgacaggtaagccaccgccgcgcccaccgcgtaggcgctaagacccagccagttaaagcgcggcaaacgggcggtgtgcagcagcggatagcggccgccgcgataaaaccagtagtcggcgaggatcacgccgccgatgggcggaatgatgctgcccagcagcacgaggaaagggatcagcatttcatacataccgccaatggccagcagaatgccgacgccggcggcgaccacggtcagggtgcggcgacgctcgctgcgcagcagatgacaggcggcggccgagacgttatagatcgtcggcccctgaatcgtcagcaggttgaggcacagcattaccaccgcggcgaccgacagcccctgcaaaatcagcacctcgacgatatcggcctgctggtaaacgatggcgcaccaggcgccggcgataatcatcagcccgttgccgatcaggaagctgctcatgctggcgacgatggcggtgcggctggagttggccagccgcgtccagttcgtcgcctgggtcgcgccgctggcaaaggtgccgaataccatggtaatggccgccgaccaggtcatggtttcacccggttcgatttgggtcatcgcctgccagccgccggcgtgatgggcggcaaggtacatcgacaccaccagcagaataaacatcagcggtaccgatacgcgcgacagcgcatccagccccttatagcccaccagcgcggtgacgcagaataggatgccgaacaggatcatcagcggaatcgtcatcgccgcaggcagggcgaggattttgaccagcgagatggcgaccgtcgcggttccccaggcgtaccatcccagctcggcgaagccgagaataaaatcggcgagcttgctgccgatttcaccgaagcaaaaacggcccatcagtacggtatttagcccgctgcgcgcggcaatccagccgagcgaggcggcgtacagggccagcagaaagttaccgataaccgcaatccacagcaggttaacgatggagaaagagacgccaagcttgccccccgcgaacatggtgccggtgaaaaaagtaaagctgaacagaaccatcgagatggaaaaaacgcccttgcgcccggcggcgggcgcttcgacgagcggaaaatcattgctgtttgacatggtggaacctctgagtggctatccaaatagcgatggcagaggggtagcaagaggtgtgccagaaaaagcggggcagaggtaacacaatggggtgggcagtatgcacataaaacgacgttaaacggccgctgtttgccataaatgtgtgcacagtgccatgttttgcaccgccgtggggcagtgggatgtgactcctgcccctgcatttttggcggacgacggctggcgtcttacccgaacagggggcaggtcagaatcgacaaatgatgccaattttacgccgtttcccggcggcacgatcccccatctttttaaccgcccgcaggcggtaattttggcgtcatgaaaatgctcagttgtattgttgttaaaaacagtaatttcatatgcttttctgatataaccattatcaatgtaagtctttcctgaaatattgttcgcttacgctggcggtgttagtatcgggtaaatagccatttagacggctaaatacaacatcgctaaactaaggaactgctatgtggcaagaaagactcgcgcaactggtcaccacctgtcattggatcggcgcgaaaggctgggcaccggccaccggcggcaatatgtcggtgcgtcaggatgagacctggtgctggctgagcgagtcggggcgtgataaaggcagcctgacgacggaggatttcctgcaggtggagatcgccagcaataaagcgccttccggacgtaaaccctctgctgaaaccggcctgcataccctggtgtatcgcctgttcccggaagcgaatgtcgtgctgcacgtgcataccgtcaacgcgaccgtgctgtcgcggattgaaaaaagcgccaccctggcgctgcagggctatgagatgcagaaaaccctgaccggccagcacagccatctcgaaaccgtgccggtcgccatttttgataacgaccagaatatcgatgccctggcggcgcgcattgaagattatgcgcagacccacccgctgcgctacggcttcctgctgcgcggccacggcctgacctgctggggcaaagacattcacgaagcccgtcgccagctcgaaggactggaatttttgttcgaatgtgagctgatgcgccgccgctacgagcgcgactaatttctcttcaccaacgggtcaggcatggatttttatctcggaatcgatatcggcacctcgcgcgtgaaagcggtgctgtttgatgaatgctttcaggcgtgcgccagcgcggcgcagaacaccggcccgcggctgtcggccaacggtcacgccgagcaggatatggcccagctgtggcagtcggtggtggcgattttacgcgatattgcccggtatccggcgctgcaaagcgggcgtttacgcgccatcggccttgccgggcagggcgaaggggtctggctcagcgacgccgaaggcgaaccggtcgggccgggtatcctgtggagcgacacccgcagccgcgacctgatgagcgaactgctcagtcgccccggttttgaccgtcgcttctttgacgataccggtacccatctgcagccctgcaacaccagtatgcagctgtactggctcaagcatcaccagccggagcggctggcggcggcccgctatctgtttttcgccaaggactggatccgctttcgcctcaccggcgtcgcggcgctggatcttaccgatgccagcacctctttgctgaatcagcagagcggaaagctatccacggtggtgctcaatgagatgggcctggcagatttacaatctctgttcccaccgctgctggcgccggacgctcaggctggaacgctgcgtgaagaggtcgcggcgctgaccgggcttcccgccgccacgccggtcgcggcgggcgcgctggatgtgtgcagcgcggcgctgggctgcggcgcggtcaacgatggcgatatttataccattcttggcaccacctgctgcaccggtatcgtctgccacggtcgccagacggtcaacgaggggacgcgctacgtcacccataccgaagcgggcagctttattaacctttttccgatgcaggccgggacgccgaacatcgactggctccagcagcagattgcgctggagccggatttacagcagctggaacagcatatcgccagcgttgagcccggcagcggcggcgtcttctggcagccctacctcaacggcgaacgcgccccgttctttagccccgaggcgcgggccggttatttcggcattagccagcacaccacccgcgcggagctgctgcgggcggtgtttgaagggctggcttacgctatcgtcgactcgcttcagggctacccgcagggcggcgaactgtacctgaccggcggcggcgcggcttcggcgacctggctgcaaatcattgccgactgcaccggcagaacggtggtttccagtcctttcaacgagcttagcgcgcgcggcgcggcgattctggcggcgcgcagcgtcgatgccctgagccgctatccggcgctggagcagacccgctatcgaccccatccgcaggcgcacagccgctacgccgcgctctatccggtatatcgcctgctgcgcgagcagatgctcccggtgtggcaggcccgccgcgaggcgcttcaacgtatttctcaggaacaacgcatatgaaaattgtttttaccgccgaacacgccggcgacctcagcgcttttcagcaactgggcgaactgcgggtagaaggctgggcgctgggcaagccgaagctgagcgcaggccagctgatcgaactggcccacgacgccgaggtgctggtgaccagctacgatgaggtgacggaagcggtgatcgccgcctgcccgcgtttacaggtgatcgcctgcacccgcgccaatccggtgaacatcgataccaaagccgcccaggcgcgcggtatccgcgtgctctatacgccggggcgcaacgcggacgccgccgccgagctgacgctggggctgatgctgagcctggcgcggcatattccgcaatcccacgcggcgctgaagcgcggcgaattcacccacgccgaaaacgccgcgcaggccacccagagcggactgcgccgcgatgtggtgtgggacgttagtccgcaaagcccttatgaagtctttaaaggcagcgagctgcgcaacaaaaccctggggctgattggctacggtaatattggccgccgggtggcgcgtatcgcccgcgcctttggcatggcggtactggtggtggacccgtttgtcgccgccgaggatatcaacgaaccggggttgcaaaagacgacccttgaggggctgttccgcgaggcggatatcgtgagcctgcatctgagcagcggcccgcacagcgatgggctggtgaacgcgccattgttgaacagcatgaagccgggcgcgctgctgatcaatacctcgcgcgcggcggtcgtggacgaagaagcgctgattcacgcgctgcgccatggcccgctgggcggcgcggcgctggatgtttaccatcgcgagccgctgtggcgcgaccatccgtttgtcaccgagtttgataacgtgattattacgccgcatatcgccggggcgacgcgggagagcattgctaaacatacggcgatgattgccgccgacctccagcgctatgtcgccggagagccgctgctttatcagtggcgttaagccgcgcttgccgccgcgcaatgcggcggcgaagcttgttatccgcgacggtgggtcgccataaactcctgcgtatgctgccagtccaccacgccggcatccgatcccatgccggtcgccaccagcgcggcgacggcggaagccacctcgcacgccgctttgacgcttaacccccgggccagtgcggcaataaagccgccgcagtagctgtcgccgcagccggtagtatctacggcatcgacccggaatggcgcgatatgctcgacggcgccgtcgcgggtcagcagccaggagccgttttcgccgtccttcagaatgcaggttccgacgccaagcgcaaagaagacgcgggcaatcgcttccggctgggtctccccggagagatacgccgcttcttcaagggaaggcataaagtagtccaccgacggcagcagcgggcgcagcagatccagggtgcccgcgtcgggggcgattaaatcaaagctggtggtgacgccgcgggctttcgccgcccgcagcagcagcgcgctttgcccgctatccatcgccgccagcaggccggtgccgccgtggtgcaggaaccggcagtcgaggatcgcgtcaaactcttcttcgcggataaaaagcgcatcggaagcgccccgacagtgcagcgccgggcgctcgccgttagggcggatgggcaggatcgtcgccgacgtttcctgctgcgccttacgctggaccagcgagcagtcgatccccagccgcgcgtagctggcgaggataaaatcggctttttcatcttcaccgaggcaggccaccgcggcggtgcgaatgcccagcttcgcggcgttaatattggccccggcggcggttccggcggggttaagacgaatttgttcgataaaggctaccccgccgcgcggcgggatgtcgatcaccgggcgaccggcgatatcaagaatagtcaggccgacaaagacggcgtcaaaagctgccataggtgctccgcttaacgatgagtctggcgcagacgcgcctgccagaaggagagggccagcgcgaccaccagaatcacgcccaccagcgcatccttcaccaggtagttcagccccatcaggttcaggccgttatcaataatcgcgagaaacagcaccccgccgagggtgccggcgatgctgacccggccgagccggttaaaggcggtgccgataaagaccgcggcgatggcgtccatcaggtaggcctggccggccagcggcgtaaactggcgcaggttggcggagagaatgacgccgccgacggcgcacagcgcggaggccgccaccagcacccacagcatggtccggcggtcgcggatcccggcgatacgcgccgcttcgccgttctggccgatagcgcgcacgtacttgccaaacagcgtgcgttcggtcagcagccaggctaccagccacagcgccagcacaatcaccaccggcgtcggaataccggcgatattgccgaccgccagatcgtgatactccggcgccatccggcggtaggagatagagccgccgccgtcggtatagatacgctcggcgctgctggcgataaaccaggtgccgagggtggcgaggaacggacgaatctggcagacaaggatcagaaaggcgttcagcaggccgataatcaccccgccgagcagcgcgcagcccaccgccgcctgccacggcaggtgccaggtcttcagcgccaccagcgcaaaagcggcgccgaaatccagcgccacgccgacggagaggtcaatcgccccggcgctaacgataagggtcatcgccatcgccacgatcagcagaatcgcgctgccctgcagcaaattggcccagttatcgaaggtcagaaataccgggttcgcccagccgaacagggcaatcgccagcagggtaatgacgccgaatcctgcccgcgatagccacgccagcggaccgctgccggtttgccccgttgagggggtcttgagcgtcagttggctcattaatggcctcctttatgtctgaccgccgaagccgccagcaccacgaggatcaggccgcctttgatcgcgcccatccagaaaatattcactcccagcaggccgagcccgttagagagcgcgttgaccagcaccgcgccgagcagcgccccccagatggtgaccacgcgccgccgcgagaacgccgcgccgataaaggtcgcgaggacggtttccagcagcagcggcgtcgccgtgccgctggagctgcctgagccctggctgagcagcggcaaaatcgccaggccggcggcgatgcccgccagcagccagacgataatggtcaaacggcgaacgttgagtccgctcatctgcgccatatcgcggttaccgcccaccgcctgtaaatgctggccgaagcgggagtggtggagcaaaaactgaaacagcgcgaagaccgccagcagatagagcagcggccagggaatgccgaacagatcgttatcgcgaaaggccaccatcagcgggtcgctcaccgcgatgcgccgctggccggtcagcaggtcggtcaggccggtgaaggccaccgaagttgacagggtcgccagcagcggcggcaggcccgccgccagcaccagcgtggcgttgacggcgccgcaggccaggctaacggcgatcagcagtaacaacagcgccaggtaaggggtgttccactccgccatgccgaggctgagcagcgcgacgccgagcaccgcgatggcgggcagcgacaggtcgatgccgccggagaccacatcatcgccgccgacggcaatcacgcagaccaggccgaagcagaggatcgccagcggcacgctttgcaccagcatcatgctgatattttgccagcttaaaaagaaaggcgactgcaggctgagccagatcagcagcgcaaaaaagagaatcaggggaaatttttcgataagcgtcgtgatgcccggaagggggcggcgctggatacctgcactcatacctgttgttcctgtccaccgttaatcgtcaccagcagcgcgtccagcgtcagcccccgggtcgggagattggccaccaactcgccgcgccacatcaccaggatgcggtcgcaaaggcccagcagctccggcgcgtcgctggatgagaccagtacgccgcgaccgcgatccgccagctcgcgggtgcgctgataaatatcgcggcgcgcgccgatatccaccccgagagtgggttcatcaagaataaaaagccgcgcatcggtgcccagccagcgggcgagaatcgccttttgctggttgccgccgctcataaagcgcaccggaagctccggacggccggggcggatagagagctggtcgatccagctgcgcgctttttccagcgcccggccgcggtgctcccagccgaaagtggcggtctccggtagcgaggccagattgatattgtcggcggtggtgaaggggagaatcagcccctgatggcggcggtcgcgcggcaccagggccagtccggcccgggtagcctgatacggcgtccgcagccgcttcggctggccgtcaacgcttatcgtaccgctgcgggcgcggcgtagcccgtaaagcagatcgatcagcacgtcgcgcccggcgcccagcagtccggcgacgccgacgatctcgcccggctgaatatcaaaggtaatatcgcgtaactgctgcccgtcgctgagatggcgaaccgacagtaccggggcagcggcatcgacttgatgcgcgctgctctggcgcggggtatagagctgttcgatatcgcggccgaccatcattttgatcagcgcgtcggtattctgcagaagcgcccggtcggggtagccgaccacctcgccgttacgtagcaccgtgccgcgatcgcaaagggcggcgatttcgttgagatagtgggaaatgtagagaatcgcgatcccctgttcccgcaggcgcagaatcgcggaggtgaccaggccggcttcctgcgcttccagcggcgcggtgggctcatcgaataccaccagctttgccgcgccgtcgatcagcgctctggcgatttgcaccagcttgcgttcggcgaggctgaggtcgcggatcaggcggcggggatgaatatccagctgccagctgtcgcggaaaaacgcccgggtggccgcgttcattcgccgccggtccagcgcgccccagcgggtgcggtactcctggccgagaaacaccgattccgccaccgtaaagtgcgggattaggttgagttcctggtgaataacgcggatacccagcgcttcaatcgccgcgggattgccgagcggcagcggcgcgccgtcaagggtggcgctgccgctgtcggcccggtagacgcccgcgaggatttttattagcgtcgattttcccgcgccgttctcgccgatcaggccgtgaatttcaccgggattcagaagcagcgtgaccgcatttaatgcagtcacgttggcaaagcttttgccgatctggttcatcgccagaccagcggcggggttaaccccgccggaggatggagtgatcactgcagttcgccatatcccagctgtttgtagaccgcttttgcctcctgcgggcctttcaccggcaccaccggaataaaggtctgcagcggcagcttctgtttgtcgaagtagcgcgcgacgttatcggcggaggtctggccgatcaggtgcggctgctgggcgacgttggcgacgaacgggctgcccggctcggccatgatctccagggtttccgggccggcgtcgatcgcggtgaccttgacgtctttatcgcggccggtctcttccagcgcctggacaataccgatagccggctgatcccagcaggcgacatggatggcgtcgagtttgccttttggatactggctcagcagttcgagggttttcttacgcgcatcttccggcgagttggcaaactgctcggccagctccggctgaataatgtgaatatccggataatccttgaggacatatttccactggtcataacgaatgccgcaaatacgcagggagctggagaatgcgttaaataccgcaacgttgcctttgccgcccagttcatcggccatatagcgaccaatggtcgatcccagggtgtagttatcggaggtggtgttattgaccgaatattttgaaacgtggtctacggtaaataccggaatgccggcatcgcgtagcgctttgaatttaggctcaacggcgctgtcgcccagaatgctaattaccgcatcgaccttgcgcgacagtaaaatatcgtggttattcgcatgaacctggttatcgcggccgccatcgacgccgattactttaccccccagtttctctacctcttcggtcgcacccttataggcttcacgatcccagaagtgctgcgtcccgaccacggcgacgccgatagtttttccctgaagtgataaggcctccgccgccagagcgttgacggaggcgagcgagagcaggcccagcgcgatgggcaataatttcattttctgcgacattcttattatggtcctgtgatggaggtggctgtgcggagcagtagcatgacaacaacagccacacaatctcaaatacaaaatatgtctaagttatacccgttatacttcaagttgcatgtgcgttggctacgtgcgttcacccgaatcgcttacttgagtaagctcatcgggactctcttacttgccgcgttactcggcctgcggcctcaccccttacggggccagcgcaagcgctgttcaaaacggttaaccgttttgtcctgaaacttgaattatttagggtatattaacgatgttatatcgcagatttgcctgaggaaaacgtaaatttgttatctgtaacctgaaaatatttcatgatgcagcttaatccctttttattttgtgggcttaatttgcttgcaactcttatttattcaaataaagattgctgcttaattaaaattattctgtcgctgtaatatatcgtatcccggaatggcgtagaactattctgcgtggaaaatcctttctcagcagcagattgtatggtgatacgtattttattcccaggattcgcacgctttattatggcggcctttatcgggtgagaagaaaacaggcaagatgaaaaaacaacataatctgaccgtaatgcactggggaacctggcaggtccaggcccgtgacggcaacattgaggcggtgacgccggtgccctgggataaaaatccctcacgtattggtcagtcgctccccgatgcagtcaccagcaagacgcgcattcgccgtccggcggtgcgcgcgggctacctgcaaaatggcccggcttcgcgcgaggggcgcggtaaagagccgtttgttgaggtgagctgggaggtggcgctcgatttactggcccgcgaactgaattcggtcaaagcgcgctgcggcaatgaggcgattttcggcggctcctacggctgggccagcgccggccgttttcaccacgcgcaaagtcagctgcaccgcttcctcaagtgcttcggcggctataccgccagcaccaacacctacagcagcgcggcgggcgagcgcatcctgccgcatattctcgggccgctgagcccgctgcaccgccagcacacccacttttccgagctggcgcgcgaatgccagctgtttgtcgcattcggcggcctgccgctgcgtaatgcgcaggtcaacggcggcggcgccaacgaccatatgctgaaatactggctggaaaagatgcaggcgcaggggacgcgctttatcaatatcagcccggtgcgcaatgacctgagcgccgtggagagcgccgagtggcttgcggttcgtccgggaaccgataccgcgctgctgctggcgctctgttatgtgctgattaatgaatccctctacgacagcggttttatcgccagccataccgtgggtctcgcgccctatcgcgcctacctgatgggggagagcgatggcgtcgcaaaaacgccggagtgggcggcggcgataaccggtattgaggcgcagcggattgccgcgctggcgcgcgagatggccagccagcgcacgatggtcaatatctcctggtcgattcagcgggcgcgccagggcgagcaggcctactgggcgacggtggcgctcaccgcgctgctggggcaaatcggtacgccgggcggcggactggggtttggctacgcctgcaccaatctggcgggggcggcgcgtaaggccttttccgggccgcgccttcccgccggagagaacgcggtaaaccaggtgattccggtggcgcgcctttccgatatgctgctgcatccgggcgaggcatacgagtttgacggccagcatctgcgctatcccgacatccgcctcgtctactgggccggcggcaacgcgtttcaccatcatcaggatattaaccgcctgtgtgaagcctggcggcggccggaaacggtggtcgttcatgaacagttctggaccgcgcaggccaaattttccgatatcgttctgccggtcaccacgtcgctggagcgggaagatatcggcagcggcggtcacgacggctttatgatcgccatgagcgcgcagatcccgccggtgggcgaagcgcgcgatgattacgccatcttctgcgaccttgccgagcggctgggctgcggcgagcgctttagcgaggggcgcgacgccgggcagtggctgcgggagatctacgaagcgtcgcggccgcgcgcgcgggaagaggggatcgcgctgccgtcgtttgatgaattctggcggcagggggtgctggaatacagcgcgccggagaaaccgcaggttttcctggcggattttcgcgccgacccgcagcgctatccgctctctacgccttccggcaagatcgaacttttttccgaaaccatcgccgggtttggctatcgcgagtgtcccggccacccgtggtgggatgagcaggaggaggcctggcagcggcaggaggcggcgcgctggccgctgcatctgctctccagccagccgcgcacccgcctgcacagccagtacgatcacggcagcgtgagccgggcgacgaaaattcgggggcgcgagccgctgtggatgcatccgcaggatgcgcaggcgcggggcatcagcgaaggcagcgtggtcaaggtctttaacgcccggggagccattcttgccggggtgcacctcagcgagcagattttgcccggagtggtgcagatgtcgaccggcgcctggtacgatccgctggatccggctgaaaaggggtctctggataagcacggcaatcccaacgtgttgaccgaagatcgcggcagctcgcggctggggcagggctgcagcgcccaaagctgctgggtggagattgcgccgtggcgggacgcgctgccgccggtgaccgctttcgacccgccgatgtttattcagggttaggcgcccggtaattcccggcttacggaatcaaagccctcctggggcggatagcccggacagatgcgcagcatcgcctccgggaaattcagccacgctgcgttctgctcccgggggcggcgcagggcgcctgcccgggctacatgttcacagttgtctgcagatcggtagcccggataaggcgcgttacgccagccgcgggtaggcgctggcgatatcgtcgccggtaaactgggcaatccagccttccgggttgtcgaagatgcggatagcggtgaagttgggctccgagcccatatcaaaccagtgcggcgtgtgcgccggaacggaaatcaggtcgttcttttcacagagcacctggaatacctcgtcgccaatatgcaggcaaaacaggccggctccctcgacgaagaagcgcacttcgtcttccccgtgggtatgctcgttgaggaatttttcccgcagcgcctctttctgcggattatccgcacgcaggctgatcacgtcccagctctggtaacccttctcagccaccagcttatcaatcgcatgctgataggcggcaataaccgtttctgaggctggcgccgggcctaaatcgcggtcggcctgccagcgctcgaagcggacgcctttggcgttgagctgctgctggatctcttcggcgttcgtgctgtgccagagagaattttgcgggtctttcacggaaaaaatggttaatgcgctcatgctgggatctgctccggatgaatatcgtcaaaacgctgaacctgcggatggtggctggccgggtcacggtcgccgcgcaccagctgtagggtgcggaagccggcctcttcggcggcatccagctcctgatggatatcggacaggaacaggatggcggcaggaggctgtcccagctgctcagcaatattgcggtaggactgcgcttcgcgcttggcgcctaccagggtatcgaaatagccgttgaacagatgagtaatatcaccttcgtcgctgtagccaaataacaatttctgcgcggcgacggagcctgaggaatatacatataaatcaacgccctgtgacttccatttttccagcgacggcaggacgtcaggatacaggtggccggtgaagtcgccattgacgtagccttcgcgccagataatcccctggagcgccttgagggcggtagatttgcggtcttcatccataaaggcgaacagggtagcaataagctgctcgacgctggccgccggttgggcgatctcttcgcgcaggttatcgagaatggtctttaccggatcgacaaactgctgggcggtcacgaagccggccaggcgttcgcgagcgtacgggaacaggacgttgtggacgaagcgaatgtcgctggtggtgccttcaatatcggtcacgatagcgcggatcatgagttctccagagtgagcggtaggtcgtgctgacggtggcgttgtgctgctcgctgttttccactcataagcataagcgaaataacattatcatttagacgtctaagcgtcttgattgccaaatattaacatcgtgttatagtggcttcaacaacagcatgacagacggtacaaaaagaatgagcaataagccactgattcctgagagtaaacttccttcactgggcaccacgatctttacccaaatgagcgctctggcccagcagcatcaggcgattaacctgtcacaggggttcccggatttcgatggtccgcgctatctgcaggagcgtctggcgtatcacgtggcgcagggggcgaatcagtacgcgccgatgacaggcgtggccgcgctacgcgacgccatcgtcgataaaacggaagagctgtacggctatcgtcccgatgccaacagcgacgtgaccgttaccgccggcgcgacggaagcgctgtatgcggcgattaccgcgctggtacgttccggcgacgaagtcatttgctttgaccctagctatgatagctacgccccggcgattgagctgtcgggcggcgtgctgaagcgcattgctctccagccgccgcattttcgcgttgactggcagcagttcgccgcgagcctcagcgacaaaacccgactggttatcctcaatacgccgcacaacccgtcagcgacggtatggcagcgggaagattttgccgcgctgtggcaggcgattgccgatcgtgaaatctatgtgctgagcgatgaggtttacgaacatatctgctttgccgccgaagggcatgccagcgtgctggcgcatccgcagctgcgcgagcgggcggtggcggtctcttcgtttggcaagaccttccatatgaccggctggaaggtgggctactgcgtggcgcctgccgccattagcgccgagctgcgtaaagtgcatcagtatctgacttttgccgtcaatacgcccgctcagctggcgattgccgatatgctgcgcagcgagccggagcactatcgccagctgccggcgttttaccgcgagcggcgggacctgtttattgatgcgctgcgcgccagtcggctggacattttgccctgcgaagggacctacttcctgctggcggactacagcgcggtctcggatctggatgatgtcagcttctgccgctggttaaccaccgaaatcggcgtcgcggcgattccgctatcggtgttctgcgccgatccgttcccgcataagctgatacgcctgtgcttcgccaaacagccagccacgctgctggctgcggcggaacgactgtgtcgtctgtagttatttaacggtccacgcctgagaaaattgacggtcgctgaacatctccaccagaccgttgatttgcttcaggcgcaatacttcgtctgagtccatccctaactctttgccgattttctcgtcacaccagccgagatgcgccagctcctggacgatttccgacatcgcatgaatctgatgacgtccgcgcgcccggttgtggcggatggtggcggccatcagcgaatcacgcctggggctgctcttttccaggcaggtgacgggaaggtagcctttcagtcgtttcttcagcgccgctctgccgctcgccagctcatgacggtgaaaaccgtcgataatggaatagcgctcctgatcctgtttcactaccacaacgggctgcgtgaagccgtccgtttccagcgaggtaaacagcaggcgtttttccggtggcgcaagattatttgggttgtaatcattaggcaaaacggcgccctgttttacccacaatacgcagtcaaccggttgggatttgaaggggctatattcatgcagaatctggcgaaaggcgttaagcgcagtaatcttttcctcttcatcttccagcgattgcagatagcgttcgagatcctggattaattgtcgttgcatagtatcccccattgctggcgctttttattcatccgttcgcgatagcgtttatattgattcgctttggtcgggctgaaagagagctggcggcaccagtaatcattgttcaacagaactttacagatgcgccgccaggacgggacgtctttcgagccaatatccgccggctgcgtgtccggaatatctatcattccctttttttggtaccagtgaagatagacggcgattttattgcggtaatgttccgccgttttctccggcatgctgtcgagtaaaaacagggcgtagcttttccaggtatgctgcgcaggtttatccagctttcgatggccgtagaactgattatcgtgaccggcataaactccgccgcagtggacgccgctgacgcgatggcacatggcggcccagcgttcaggctccagcacatggtagagccacagcccctggcgctgctccgggccaaagggttcgcagatacgcatatagcgcagcggaacgcccgcctgatacatcaggttatagagcgggttgtaggacaggccgcttttgccgaaccaggtccagatatcggcggttttccagtcgtagataggatagatgtaccacgcgtgtccgcccggcgcggaggtggtccagggtttatcgtcggcgaagcgaagcttgcgctgcgaggagatggtgataaaccgatttaacgattcatcggcgcggatgccgatcatcaccgccgcggggcggttttgcgaaaaccaatcggcaaattcgcgaacgaacgtttcaaaactcatgcccgattgataaaacgggaaaaagccgggatcggtaatcgcgtcctttggcggttgtcgcacccagggcgcgccgggttcccagcactgccattcgggatgatattgggtcagagaattctgggtagtgagaggcaacgcgacccagaaaaattgctcaataacgtcgcgatactctgcgcgcatcttttcacaatgcgcaatggtgcaagagaactgcgcttcccaatccacaaacaggacgcaaatctttttgcctgtacggcgggcgtgctgcgccgtgagatgcagcatgattgtagaatctttaccgccagaaaaagagacgcaaacacgggagaagttttccattacccattctattcgctgctgactggcctgcagaacggactcgggtaatggaagttttataaaagacacagccattattcctttaatgctaaaagatactgtgtacttatatcacatttatttcttaatcaagagattacttattattcgttaatcaaattaaatggcattaactattcaataattttattcttttcacattcgtcgataaagtttgcaaagttcgggtcgtcaaggtttacccgattgtaaatcatataaatagtgatggaagggatcttaaatggcgcctctataaccttaaatttattatggaaactgatgtgttctaaaatacaggtgggtacaaacccaataatatcagtttgctgaataacattaaggatcgctatgtatgaatcgctacggaacgaaattttcctgtcagacagtatgccggccgcctggctttgaaacgacttcgttccctgatcgttgcaaatataatacgtaaagcgctcctgcagtatggctttcgtcgttgttagcgatgccagccgaggatgattttcactacagaccagagaaatgcccagctcctgaatacgtttacacacggtagcccgcgatgacaggggcgtggtgctaaatatcaggtcggctttacggtaggccaacaggctttctaccgactctccggacgccagcagatcgtgatgttctacgtgtaagtttgaatcatctaataacatatggatcaggctggttgtttttggggtaataaaaagctgcggcgcatagacaaccaggcgtttctttaactcagaacgattggtgagataaatagtttgttctaattgattaagatttttttcaagatgatggtggagattaacccctacggtggtcggcgtaattcctttacctgaacgaacgaatagcggatcattcagctgggtgcgtagccgctgaagcgactgactgacggcggagggcgtaataaatagcgtttccgccgctttactgatgcttaaatgctggtaaatacattcgaaaataacgagtaggttcagatcaaatttcttaagatcgtaaagattagccattatcaacgtcctgttaagctggcggtaagggaaactggtgaatatgtatctgtattatattcattgtatgaatatttgtttcttgttatttaatgcaggcgccgtcattaagtttatctaaatatatactaccgttgcgtattctaccagatccttttgtgtaccgctaaagtcaggggagtgggttatttataaatacttaccttgccccgcttagcatctgtagtttttctttaacgggaagcctgaacgcttgttgaagtttatttggttattcatattataaattactgatacgtgagcggcactgaggatgttcatcaaccgcgggcggtaattaaattctttattctccggctttcgctggtcctgcgggcaagtatggcaagtggaagagcggcagtgggggcgtctgcatcgcgctaacgcgggaaacatgtcacaaagaacgggcattttgacatggtgatgctctgtgaaatcaccggaaaagtaggggtagcggtaaaacctatcacagtcataggtaacacctgccgccgcgtggattgccctttcgttcagcgggtgatgtaatcccttagctgttacattaaggtgtagagcgcaacacattgccagctactggcgctgaacctacctgcgggtgtttcaggtaacggggccgcctgcgagggcggcctttttacttttcagcgcatataatgcgaaacgcggtagaagattgtcatcgcgttgacaggttcacaaagttgtcttgttccggttgttagataacgcttattgattcgataatgcaaacgcattggtcgagtcaggaaaaattcgttaacttagacctcaacgaaaacacggaggaagtatagatgtccttaattaataccaaaatcaaacctttcaaaaaccaggcgttcaaaaacggtgaattcatcgaagttaccgagaaagatactgaaggccgctggagcgtcttcttcttctatccggctgacttcaccttcgtttgcccgactgaactgggcgatgtggcagaccactacgaagaactgcagaagctgggcgtagacgtttactccgtctctaccgacactcacttcacccacaaagcgtggcacagcagctctgaaaccatcgcgaaaatcaaatacgcgatgatcggcgacccgactggcgccctgacccgtaacttcgacaacatgcgtgaagatgaaggcctggcagatcgtgccaccttcgttgttgacccgcagggtatcatccaggctatcgaagttaccgctgaaggtatcggccgcgacgcgtctgacctgctgcgtaaaatcaaagcagctcagtacgtagcttctcacccaggcgaagtttgcccggctaaatggaaagaaggtgaagcgactctggctccatctctggacctggtcggtaaaatctaaatttccatcgtctttcacgccaacgcagctatggcgtgaaatacttgggaaattatttcagtcatgggcgcaccggcgcccattttattccaacaccatgatgcaagcgtattcaggctgcctgaacgaggccgcttgcatgatgatgttttaagcccaggagataaaaatgctcgacaccaacatgaaaacccagctcaaggcttatcttgagaagctgaccaaacctgttgagctgattgccacgctggatgacggcgctaaatcggcagaaatcagggaactgctggctgaaattgctgaactgtcagataaagtcaccttcaaagaagataacggcctggcggtgcgtaagccgtcattcctgattaccaaccccggctccagccaggggccgcgctttgccggctctccgctgggacatgaattcacctctttagttcttgcgctgctgtggaccggcggtcatccgtcaaaagaagcgcagactctgctggagcagatccgcaatatcgacggtgattttgaattcgaaacctactattcgctttcatgccataactgcccggacgtggttcaggcgctgaacctgatggcggtactgaacccgcgcatcaagcacacggcgattgacggcggaacgtatcagaatgaaatcaccgaacgcaacgtgatgggcgtaccggcggtatttatgaacggtaaggaatttggtcagggtcgcatgacgctgacggaaatcgttgccaaagtggatactggcgcggaaaaacgcgcggcggaagagctgaataaacgtgaagcctatgatgtcttaatcgttggctccggcccgtccggcgcagcggcagccgtttactccgcgcgtaaaggtattcgtaccggcctgatgggtgaacgctttggcggccaggtgctggataccgttgatattgaaaactatatttcagtacccaaaacggaaggccagaaactggctggcgcattaaaagcgcacgtcagcgaatacgatgttgatgtgatcgattctcagagcgcctccagactgatcccggcgacggttgaaggcggcctgcatcaggttgagaccgcctccggcgcggtgctgaaagcgcgtagcgttatcattgccaccggcgcgaaatggcgtaacatgaacgtgccgggtgaggatcagtatcgtaccaagggcgtgacctactgcccgcactgcgacggcccgctgtttaaaggtaaacgcgtggcggttatcggcggcggtaactccggtgtggaagcggcaatcgatctggcaggcgttgttgaacacgttactctgctggagttcgcgccggaaatgaaggccgaccaggttctgcaggataaagtccgcagcctgaaaaacgtcgatatcattctcaacgcgcagaccacggaagtggtgggcgacggtagcaaagtcactggcctgcagtaccgcgaccgcgtgagcggcgatgagcatcacgtggcgctgtcggggatcttcgtgcagatcggtctgctgccgaataccaactggctggaaggcgcgattgagcgcaaccgcatgggtgaaatcatcattgatgcgaaatgtgaaaccaacgtgaagggcgttttcgctgccggcgactgcacgaccgttccgtacaaacagattattatcgccaccggcgaaggtgcgaaggcgtctttgagctcgttcgattacctgattcgcactaagactgcataattcataataaagtaagaccaaacctgcacagcaaagaggctaccctggggtagcctcttttttcaccttaccgccgctacctgaccaccatcaccggaatatgcgcatggcgaatcacgcttgaggcgttggaacccagcagatgggtgctgatcgaagggttacgggagcctatcaccaccacatcggctttaatttcattggccagttcattgaccatatcgcgcacgttgccaaagcggacgtgcattttgattcgcgacgggtcaatgctgaaatggccggccatcgttttcaggcgcgtttctgcttcatgctgcaaatgctcttcaaagcggcgcagatcggcggtaaaacgactcatcgtgaagcttgatgaaccgggtagtacgtggagaagatggataaccccgtcctgctgggctaaaaactccgcatggcgaacggctttatcgcttaactccatttcaaagacatcaacgggcataatgatggttttatacatatgcattcctccttgttcgtctgcttttatatcaacacattataggaaagtattgtgccattcaggtcgcaaaattgtcagaacggtacgagggcggcgtaaaagtttgtcaaaagagaggagaagagcgaaagatgcagaaagaggatgcagtaacatcctctgaataaagcgcgaaacgcttcaggcagcggggagattaacggtgaaaatcgccagcggcctccggctgatacagcagttccagcacttcaaggtgcgttgaggtgccgcccggtaattcccagtgaatcgtgctgccgactttgaggcccagcagggctgcgccaaccggcgccatcaccgaaagctgggtggcgctatccgtgacctgcgccgggaaaaccagcgtgcggatgcgctcttcaccggtggttaaatcgcgaaatctgaccttgctattcatgctgacaacatcatgcggcatggcttccggggccagcatctgcgcgcggtcaagctcgtcattcagcgcgtccgctaccggtgagttggcgaaagccggttgttccagcagtctgtcgatgcgttctgcatccagttcattaatgataattgcgggtctggtcatctcatactccatgttatccaggaacctgtccgtaaaagaaaaccctcgccgaaaatggcaagggttaatgtcctctcatcatactgagacttgctggtggtttgaagtgattaaacgcacattcatcaacgaaccatagcggagttgtatgaaatctagccggctttatccagcagaaattgcttaccgcagttccccggatggggttggggtaagaatgaatcagcggagagaggggcattaatggccgctgctttgatggagatttgcatctcagtcagataggcggggttgccgttgcaggttaacttgaaagccctgacgttctgttttccataggcctcagcaaccgcggcgttgaagccatcccggctaacggtttgcccatagtgtttggccaggaaggcgcccagatggctctgttttatctcgccgttcaggcgcaccatggtgccgaaatagttgtcaggatcgaaaccaaagcaaacgccatgcttggcgtattcataacgttcgagacatgagttaccgcccgaacccggcatcacgccgttaagcttattcgccatttccagcgagagcccggtttcagccgcccgacatttttgcccggcttttgcttccggcatattgggaacagggcgggtcgcacagccaaagcgcatccagcgccgctcgtccaccccccgtgcggcaatagattttggcaggctcggccacaggccgtgaacggtgagaaaatcggctttattgctgagttcctgctgcaggcggcactcttccggttcgctgcggttgcggtcttgcatactttggcagaaccccgtttgccaggagagagccagcacgtagcggtcaaaatcaccgtattgcgtggcgatcagcggatctgcgctgacctgggcggcgctgagcaaaagggcaatggcaacgaaatccttcctgaacatttttattcctgatgacaaatggtcattgataacattgagttattaaagcataaaaaaggcgccaacaggcgccttttcacacggtttcagctttagcggattgcgctgccgggaaccagaacttcggtggcgataatcaccactaacaaaccaaccagcaccgggacagaggtccgtttcaccacttcaaacggcgaaatttttgccataccggccacggcgaccaccacgccggagaccggagaaatggttcggccaaggttagatgcctgcagcatcgggatcgagagataagctggattgatgccggaagagtgcgccagcttcgggatcatttcaacgaaagcatagaagggggcgttaccggaaccggtggtcatcgccgccagcatggtcagaatgaccagcaccagcatcagaatgatactggcggagccgaacgacgtggcgatagagatcagaccgttaataaagccaatggtactcagaccctgagcaaagacgccggcggctaccagcagcatcaccacaccggcaaacgcgtcagccatgccgcgatacgccgcttccaggccattgaacacatttttggtgttaaagccgcggcagaattccagaaccgccgccagcagcatgcagagcacaagaatggtgatgatgtgcagctccggtccccatttgccgtcgaaaatcagtacgccgattatcggcgtaaacggcagaatggcgtagaaagcgggggcggtcgtggttatctcgtttacatcgagcatttcatgggcgacgttttcttttttatccaggtagcgctgccagaaaaagtgagcgatcgccatgctgataatggccacaatagaaataggcagcgtggttttaaaggcaaagtcaatcagcggcatttcggcggctttggcggccagcacgacatccccggaagtgggggagagaataatcgccgccggtgaggcgcagatagcggcggcagcgccgcggctgatgcccacgttgaccatcaccgggaacagtgtcgccatcagcagtactcccagaccggtagcggaggagacggccagcgacatcaggcaggcaacgaaataagcggcgatcatcagtagatagggggagttaatgaagcgcagcggttttgacgccagcttcaccaccatgtcattggcgccgatgtgcgtcatataagtcgcgaaaccgcagagcatcatgatcatcatgccgaggtcgccgccgcggctcatcagcagtatcttaatatattcaacgatatcggttgctgaataaccggtgctctttgcgtcgcctggtaaaaccttatgccccatcagcgcgctggcgatgagtaatactaagccaccgacgaacagcacgccggtggcggaatagcctttaatgatatagcgggcgacgcccacaatgaccacaatcccaatcaggatctctactagcgtaagcattcttttacccctaaaccattaacccaaagaatctactaataaatgaagcgaagaaaaaatttagtgagggaatgtgcctaaaaaacgggcaaaactcgctgacgcaaatcaataaatcgatgagaatccctgtcaggcagtaatatgcccgcctggtcaaagcctgggcgcgagagattttcagattttttgcaccggataaatcaagagtttgcctaataccgttaaggtagtattaagattatctttgttatcttactccgctttaaaaatgatactggtaagagaaaagtgtaatgcgacgtcgatttatagggttgtttctgggatgcctgggcctgctgctatcatccacctccgctaatgcatcgtttagttcgacgcttcgcgacggctacaatacgctgagcgataacgtcgcgcagacctggaatgagcctgagcactatgatctttatatccccgcggtgacctggcacgcccgtttcgcctacgacaaagagaaaacggaccgctacaacgaacgtccctggggcgccggcttcggcgtctcgcgctgggatgataaagggaactggcatggcatctatttgatggcctttaaagactcttataataagtgggagcctatcggcggctatggctgggagaaaacctggcgtcccttagcagacgataatttccatctgggtttaggctatacgcttggcgtgacggcgcgcgataactggaactacatcccgattccggtcgtgctgcctctggcttctatcgggtacggcccggccacgttccagatgacctatatcccgggcacctataacaacggaaacgtttactttgcctgggcgcgcattcagttttgatgcgattttttatagcaataaaagagataagcggactgtcttgttgaaaaacaaagactaacgtgagcccggtgcaaaaagatagagacttttatcactttttagcaaagttgcgctggacaaaaggtaccacaattggtgtactgatacccgacacagtattagtgtcgattttttcatataaaggtaattttgatgtctaagattaaaggtaacgttaagtggtttaatgagtccaaaggattcggtttcattactccggaagatggcagcaaagatgtattcgtacatttctctgcaatccagtccaacggtttcaaaactctggctgaaggtcagcgcgtagagttcgaaatcactaacggtgccaaaggcccttctgctgcaaacgtaatgcctatctaagcaacgcgtcagtagaatataaaaacccgctcatggcgggtttttttttgcctgcggtcaggggctagcggctggccgcatgtgaaaacagccagaacgcggtggccgtcatggcaaatgagcctgacaagttgaccagtacgttgagtaacgcccagctaaagcgcccctgctggagtagaaacaccacttcggcggaaaacgtggagaaggtggtcagcccgccgcaaaagccggtggtgataagcagcttccacatcggatcgatatccgtcatgcggttaaaccatgccagccctgcgccgataataaaagcgcccagcaggttagcggtgagcgtaccaatggggatagcatgatgcatggggttaaacttcatacccagccaccagcgcaaaacgctgccggtgccgccgccaagaaacacagccaaaaggagttgcaacacggtcattccctgtttattgatcgagactaaacttcgagtgtagcgcgcgaaaggcctcactggctatgactaacctgacgggagagaaaagatgcttgttgctgccggacaatttgccgtaacgccggactggacggaaaacgcgcagacctgcgtgagcatgatgcgtcaggccgcggagcggggggccgcgcttctggttctcccggaagcgctgctggcgcgagacgataacgatgcggacttatcggttaaatccgcccagcgccttgatggcggctttctacggctcttgctggcagagagcgaaaacaacgccttgacgacggcgctgaccctgcatattccttccggcgaaggacgggcagcgaatacgctggtggcgctacgtcagggcaagattattgcgcaatatcagaaactgcatctgtatgatgctttcaatattcaggagtcccggctggtcgatgccgggcggcagattccgccgcttatcgaggtggatgggatgcgcgtcgggctgatgacctgctacgatttacgtttccctgagctggcgctgtcgttagcgctcagcggtgcgcagctcatcgtgttgcccgccgcgtgggtaaaagggccgctgaaggagcatcattgggcgacgctattagcggcgcgggccctggataccacctgttatcttgtcgccgccggggagtgcgggacgcgtaatatcggccagagtcgtattgtcgatcccttaggaacaacgcttgccggggcaggagagcggccgcagttgatttttgccgaattttcagctgattatattcagcaggtacgcgagcgtctgccggtgttgcagaatcgccgctttgcgccaccgcaattattatgacgtttttttaaacaaggcttgattcaccttgttacagattgctattgtgtccgcgcgtcaaatagccgttaattgtatgcgtgtatgatggcgtattcgcagcttgtattagagaagaaggttagctatgggtgagattagtattaccaaactgctggtagtcgcagcgctgattatcctggtgtttggtaccaaaaagttacgcacgctgggtggagacctgggctcggctatcaaaggctttaaaaaagccatgaacgatgacgatgacagtgcgaaaaagaccagtgctgaagaagcgccggcgcagaagctctctcataaagagtaattcgcgacgagtttcctgaacgagggggctcgctaccgacggggataaaccgcgtcggcaaagaggctgcagcgatagcgctgcggcctcttttgttatttgcactgagttttgacgaaaaagatgcaaccaactgttaccggggtgggatttttagcgggtaacgaaacgcatcggcagaacggaccgctgcgctaaaaatatcacgccgcggtcgaggcagagattacttcacttccatgcctttggcctgtagatcggcatgataggaggaacgaacgaacggcccgcaggcagcatgggtaaagcccatggccatcgcttcggctttcatctcttcgaactcatccgggctgacgtagcgctgtaccggcaggtggtggcggctcggctgtaaatactggcctaacgtcagcatggtgacgccgtggcggcgcagatcgcgcatcacttctacgatttcagcattggtttcgcctaaccccaccatcaggcccgatttcgtcgggatctccgggtgtgcttctttaaagcgttccagcagcttcagggaccagttgtagtcggctcccgggcggacctggcgatacaggcgcggcacgttttccaggttatggttaaacacgtccggcggcgtcgcctgaaggatttccagcgcacgatccatacggccgcggaagtccggcaccagggtttcaattttaatcgtcgggcttttttcgcgaatcgcgctgatgcagtcggcaaagtgctgagcgccgccatcgcgcagatcgtcgcgatccacggaagtcaccaccacatagcgcagcgccatatcggcgatggtttgcgccagcttttgcggttcattggcgtccggcgtcaccgggcgaccgtgggcaacatcgcagaacgggcaacgacgggtacagatggcgcccaggatcataaaggttgccgttccgtggttaaaacattccgcgaggttagggcaagaggcttcttcgcacacggagtgcaggccgttcttacgcatcgctgccttgatcccctggatacgggacgagtcagccggaagtttgattttcatccattccggttttctgagcagagcttcacgctcagttgccacgtttttcaccgggataagggccattttatcggcatcgcggtattttacaccgcgttccatcacaatgggtttactcatagcgtgcgtgttccagttgcgagtgacgaaggaaagcgaatcaattcaagtaaatgttgcatttatcaactatttttgaattaaacgcaggcagtatatcattgatacggggcataaagcagcctgctggccgggcaaattgtaaaatagttgttgttttatgcttttccctctcgtgccttatcggctaaaaagcctgacgaatcgtctctacgatctctttcagcaagggctcctgcgcgctgagcttgttatagtgcagcgcaatatcaattttttcttcccgcagcggcgggaaatcgagcatttttaagggccaaatcttctcgaccagggaaaacattccggaagtgattagccccagcatatcgctgtcgttgaccagggctgcttgagttaacagattgtagctgctgaaaccatagcggcgttcgccgagatgctcctccaggtgacgcaggattgtcgtatagcgctggccttcgggctgcaggagagcgaattcatattggctcaggtttgctgagtttgcggggagcgcgagggccggatgccctgcccggcagaagatatgtacgctatcctgaaatagcacatggtgcgtaatcgcctgcccgctgtgggggaagctgtcgaccagcaggtcaacctgacgctggtttaactggctggccgcgtcggtaatggcgacgttgtgcagcaaaatctggggaaagacgctccgcagctttttggtgataaccggcatgatcaacgcgccgatagccggggaggtggcaacggttattacccgttcccgctgcgtattgccggttaaatccagggcgttgagaaacgcctccatcccctggctgatatgcttatgcagatgcgtggcgtaggccgttggcgtcacgccctggcccttgcgaataaagagcgggtcagggaagagggcgcgcagtttgttcagggactgactaatcgccgacggcgtgatattcagtatttttgccgcgttgacgataccgttatggacgtaaaccgcttcaaaaatagtaagtaaattaaggtctatgttgcgcaaaatgcgaaacatctgacgatcgtagcgatcgtcaactcgttcggttggtacgctctgagcgttattttcttccactctgtatttccgctagtgatgattagcaccattatagcgttcacaattattttattagtgataattgattgcaaaaataaaggcttaatcgcgcctgagggataaatgtgacgtcccgcggtagcgggacgcgatggctagcggccttgaagatattccgcaggtggatcgttgagcaacgccagcagattggcggccaggcgtggagacacggtctccgtacgggcatcgggcaaccactggcgcatttgggtcatctccattccggcataaccgcaggggttaatcctcaggaatggtgacagatccatgttgatattcagcgccaggccgtggaatgagcaacctttgcggatgcgcaaacccagggagcagatttttcgatcgcccacgtagacgccgggggcgtctgctcgcgggtgcgattcaataccgtactccgccagggtgttcacgacggtttgctctaacagcgtgaccagctcgcgtacgcccagcttgcgccgtttcaggttcagcagaacgtacatcacctgctgtccgggaccatgataggtgacctgtccgccgcgatcgctctgaatcaccgggatctcgccgggaaccagaacatgttcggcctttccggcctgaccctgtgtgaacaccgggtaatgctctaccagccagatttcatccagcgtggcatcgtcgcgggtgtcggtaaattcatgcattgcctgcgagacaggttcgtaaggttgcaggccgagctggcggatgaggattttattgtgctgcaaaacaacgtctccgcagagagagaatgatttgagtggggaagtatatcacagcgagaaagcgagaatgacccggcgtggaggccgggtcaggggaagagatttacagcaccattcgtacgatttcaatattgcccagctcttcgtagagggtttctacctgctcaatatgggttgcattgatggtgatagacacagagtggtagttgcctttgctgctgggttttaccgtcggagagtaatcacctggtgcatggcgctgtaccacttcaaccacctggtcaaccagctccggcaacgcctgtcccattactttgtaagtaaatggagtagggaattcaagcagttcgttaagtttggttttcatgtcagctccggtgttacaacaaaaaataataactcccacgacgtgtgggagttatcaggataactagtatatggggatctaaatcacactttcaagtggtcgatttttaaccaaaccagtgatggaacattaatttaatgtaatcaatgattttaccgaagaaattgccttccgggatttcctgcagtacgaccagcgggcgctgatcgatcgttttgccatccagctggaagttaatggtgcctaccacctgatttttctgcagcggcgcgtgcagctcagcgttattcagcacgtagctggctttcagatctttcatgcgaccgcgcgggatagtcagataaacgtctttatccacgccgagcgaggcgcgatcggtatcgccaaaccaggcaggctcagaagcgaactctttaccggctttaatcggattaacggtttcaaagaagcggaagccccaggtcagcagctttttgctttcagactcgcggcctttgtaggtgcggccgcccatcacggcggagatcaggcgcatctggccttcggttgccgaggccacgaggttatagcccgctttgtcagtatggccggttttaatcccgtcgacgttcaggctgttatcccacagcagcccgttgcggttgagctgacgaataccgttgaaggtaaactctttttctttatagatggtgtattcattcgggacatcgcggatcagcgcctggccgataagcgccatgtcgcgcgcggagctgaactgaccatcggcatccaggccgtgtacggtctggaagtgggtgtttttcaggccaagggcgttaacgtagttgttcatcaggctgacgaaggcatcctggctgccggcgacgtagtcggccatcgccacgcaggcgtcgttgccggactgcaggttgatgccgcggatcagctgcgaaaccggcacttgcatacccggtttaaggaacatcagcgaggagcctttaaagaccgggttgccggtcgcccacgcgtcgttacccacggtgaccagatcggactctttaaacttgcccgctttcatggcctgaccaatcacgtagctggtcatcattttggtcaggctcgccggatcgcggcgggagtcggcgttgttttctgccaggactttgcctgagttgtaatcgataagaatccaggattcggcgtcaatctgcggggcgcctgggatcatcgttttgatattcaggtcatcggcgcgggcagcggaggacagcgctgccacggagagcgccgtaacgagtaagcgagcggtaaaagaggtcttcatggtctgaacaacggcatccgtgatggagttaaaaaaagtgccttactataacaaacgcactacgaaccagcatccgacattgcgcacgactttgttaatgactttgtcatgcgcaacaagcaggggaggcgggtgcgatgcctttagttggcgcgagtaataaatgactgcagctgagcttcgctttgcagacgctgttgaatcgtgctggcctgcgctttgctgctgaatgggccgagctgaatacgccataccgcgccgttttgcgtgacgcggcccgggacggaaaattgctgactcagacgctgctggtactgctgcgcgcgggcctggtcgctgacggcgccgacctgtacgacgaaatcgccgctggcgctggccgctgcggcaggcgctacggcagcggtggcggtcacggcgggcgcaacgctgccttgtactgaacccggggcggtaactggcgcgctttgaacgacaggctcgctgccttccagcacgccgttattcagcggcgtcggggcgccgaggaaaccgccgctgttgaccggcgcgccggtggtgtcttccggcttcagcgttgaattactgatggcgtgcacgtcagtttgcgcgggttgactcattgccgcgctgctgtcgccgtcaagattcgggcgggcgggcagcgcgtaggtctgtttggccacggtggtacaggccatacccggaccggaaagcgagccgtccggtgcgacgacgatcgggtcgatgcgcactttggtattgttcgaggtattcagacgatcggctgaggcgcgggacagtgaaatcacgcgatcgttaccgtaaggcccgcgatcgttaatgcgcacgacgatcatgcggccgttcgccaggttggtgatccgcgcgtagcttgggatcggcagcgtaggatgggccgcggtaagctgcgtgggatcgaacgcttctcccgatgcggtcagattgctgttaggctcggcatcgtagatggctgcgaagcctgcctgggtgaagttagacggatcctggacgattttgtagcttttgccgtcgcgttcataatcctgattcgccgtggcattaggcgtttcgtactgcggatcggcgccgctaatctccaccgttgggccattgcaaacggccggctgtggagtgctgaccgttttctgttgaacgtcttcactcgaacatgccgccagcagccctgctgctatgcagatccccagccattgcttacgcatcgcgaaccccttacacgcttttcgacaacatttttctgtgagtatggatcgacatgacgataccaaacccggccatcaatacgattagggcagagcccccgtagctgaccagcggcaaaggtacccccaccaccggtaaaataccacttaccataccaatatttacgaatacataaacgaataaaatcaacattaaaccaccggccatcacccggccaaaggtggtttgcgcctgggcggcaatccacaacccgcgcataatcagcagaatatagagcgccagcagaatcagtacgccgatcagccccagctcttccgccaggacggcaaagataaagtcggtatggcgctcaggcagaaactccagctgcgactgggttccgtgtagccagccttttccgcgcagtccgccggagccgatggcgatttttgactgaataatgtggtaacccgcgccgagcggatcggtttccgggtcgagcagcatcattacgcgctggcgctgataatcatgcatcaggaagaaccagaggatgggaataaaggcggcgaccagcaccacggcaataccaatcagacgccagctcaggccagacagaaagaggacaaacagaccggacagggcgaccagaatcgaggtcccgaggtcaggctgcgcggcgaccagcagcgtaggcaggaaaatcagcaccagcgcgatagcggtatttttcagcgatggcgggcaaacgtcgcggttgataaagcgcgccaccatcagcggtacggctattttggcgatttccgacggctggaaacggacgatgccgagatccagccagcgctgcgcccctttggagatggcgccgaaggcgtcaaccgccaccagcaggataatacaaaagatatagagatagggcgcccagccttcatagacccgcggcgggatttgcgccatgacgatcatgataacaatccccatggcgatctggccgattttgcgctccatcatgcccatgtcctgaccgctggcgctccagatcaccagcgcgctgtaggtcagcagcgccagcaggataagcagcatagtggggtcgaggtggattttatcccatagcgattttttatttggattatcagtcattattgatcctccccagccgttaccgccgggttttcactcggcagattggtgttgttatcacccagcattatatgatcgagaatctgacgcataatggtaccgactgccggacctgcgccgccgttctcaagaataatcgccacggcaacctgggggttgttgtaaggggcaaacgccgtcatcagtttatggtcacgcaggcgttcagcgattctgtgcgcgttataggtttcattggctttcaggccgaagacctgagcggtacccgacttggccgcaattttatacggcgcgctggcgaagtatttatgcgcggtaccgttgccgcggttggctacgccaaacatcccgtctttggcgatttcccaaaaaccggagtgaatatcgccgaccggcggttcatgcggctgaacccacggcaccggtttgccgtcctccaccgtgctctgcagcaggtgcggtactttaaccacgccgtcgttaatcaggatcatcagcgccttgttcatctggataggcgtcgccgtccagtagccctgtccgatgccgaccgggatagtatcgccctggtaccacggtttcttgaagcgcttgagcttccattcgcgggtcggcatattgccggagcgctcttccgccaggtcaacgccggtatagtggccatagccaaatttgcccatccactccgacaggcgatcgatgcccatgtcgtaggcgacctggtagaagtaggtgtcggccgactcctccagcgctttggtgacgttcagatggccgtggccccactttttccagtcgcggtagcgtttatccgagccgggaagctgccaccagccggggtcaaacaggctggtgttgcgggtaataaccccggcgctgagcgccgagacggccacgtatggcttaaccgtcgacgccggtgggtaaacgccctgagtcgcgcggttaaccagcggcgtattgggatcgttgaggagtccggagtagtctttgctggaaataccgtcaacgaacaggttgggatcgtagcttggcgtcgagaccagcgcgaggattgcgccggtgcgcgggtcggtgaccacgaccgccgcgcggctgccggccagcagcgtttcaatatactgctgtagcttcaggtcgagcgttaaatagatatcgcgcccggcctgcggcgggacctctttcagctggcgaatcacgcggccgcggttgttcacttcaacctcttcatagccggtttgcccgtgcaggacatcttcgtaatagcgctcgatgcccagcttgccgatatcgtgcgtggaggcgtagttagccagcttcccttctttatccaggcgatcgacgtctttatcgttaattttagagacgtagccgataacgtgggtcagggcggagttatagggatagtagcggcgcttatagcctttgacttccacgccgggaaaacggtactggttcaccgcgaaacgggcgacctgcacttcgctgaggttaactttcaccggaatagaggtaaagcggtgcgagcgggcgcgctcctttttaaagttcgccacatcgtcatcggtgaggtcgataacatcacgcagcgcatccagcgtttgctgaacgttgtcgaccttctccggcatcatctccagctggtaaatcgtacggttgagcgccagcggcgtgccgttgcgatcgtagataatgccgcggctcggcggaatcgggaccagcttgatgcggttttcgtttgaacgcgtttgatagtcggtgtaacgcacaatttgcacgttataaaggttggcgatcagtacgccggtaagcagcaaaatccccaaaaaagcgaccagcgcccggcgcacgaacagcgaggattcagccgtatagtcgcggaaagaattctgtaatttcattcgctgcttagtctaccctggtcatcattactcacggtggtaagggtggttggtggtaatgctccacgcccgatacagactctcggccaccagtacgcgaaccagcgggtgaggtagggtgagcgttgagagcgaccaactttgttccgccgccgctttgcaggcgggtgaaaggccttccgggccgccgataagcaggctaacgtcgcggccatcctgtttccagcgttccagttcgcgcgccagctgcggcgtatcccaaggtttccccggaatatccagggtgacgatgcggtttttgcctgcagccgccagcatcatttcaccttctttttcgagaatgcgcttgatgtcggcgtttttgccgcgtttaccggcgggaatttccaccagttcgaacggcatatcctttggaaaacggcgcagatattcgctaaagccggtctgaacccagtccggcattttggtgccaacggctaccaggtgcagcttcacgcgctaactccagagtttttccagctcgtacagacgacggctctcttcctgcataacgtgaaccataacgtcgccgagatcgaccacgatccagtccgcggcggcttcgccttcaacgcccagcggcagcatcccggcggcgcgagactcctgcacaacgtggtcggcaatggacataacatggcgcgtggaagtgcctgtgcagataaccatgcaatctgtaatgctggatttgccatgaacgtcaatggctacgatgtcctgacctttcaggtcatcaattttgtcgataacaaaatcctggagtgctttaccctgcaagagttccccctgggtgtgtgaagagtgataacaataaacagcctgacagtatacccgaactgttggcaaagtcgggataaatgtcgataaacgggcggtgaaggcggctatcatcccatccatcgccgatgattgcatcgccatttttgtaaaacaatttctgcaaagttcaaatggcggatgcagcctggctgcggagaataacagcctgctttgcactgtcaatggtctgcgcgcaattcttcttccgccagccaaacggcccggctatttagtacgcgcagcgtggtgaaatcaggctggagatcgacaaggctccacgcgccatgctcgatggggaagtgccacatcgccgaatccggcatattcagaagttgcgcgactaagaggctaagcacgccctgatggccgacgataagcagatggtcaagttcccgaaactgagagagggtgacggtaaagccgcggacgcgttcggcaaacgcctggaagccctccccgttggtgggcgccgcgtgctgccagtcggcgcaccatgcggcgtagttttcggcatcctcctgctgtaaatcgcggtggtggcgcatttcccagtcgccgaagaacatttcattgagcgcggcgaaggactggcgggggacgttacggtcgcccagcaggaggctggccgtgcgctgggtgcgctcaagctcactgcaaaacgcgcgctgaaacgggacggcaagcagccgctttcccagcgtttgcgcttgtctgattcctcgttcggttaacgcagtgggcgcgtgcccgctatagaggcccgcgacgttggcctcggtttcgccatgacgaactaaccataacttcatgatgaccctctcgaaaggagtctatgagactctccttgtggcaaggctagcagtagagcttctgctcatggatatagtcgagtacgctttccggcagcatgtccgcgcaggattcgccggattcaagacgctggcgaatcagggtggctgagatatcaaaccacggcgtttcggccaggtagataacccccgccgggctgctatgcatccgctcgacgtcatgagtgagatgtttgtccagccactgctgatcctgctcgcacgccatggtcagcggatagcccgggcgccggcaaacgatcagatgcacgttatcaagaatgctttcatagtcgtgccaggtggtaaaggtgagcagcgaatcctggccaataataaacgccagcgaccgttttggcccttgctcctggcgccactcgcgcagggtttgcgcggagtatgacggcgtgtcgcgcttgagttcgcgatcgtcgagaataaacagcggcttatccgcgatggccagctccagcatatgcctgcgttggtcgctggtggcttcgggctgcgggcggtgcggcggcacgttgttgggcacgatggtgacttgattaaggccaatctggttggccagaatttccaccggtttaaggtgaccataatgcaccggatcgaaggtgccgccgtacattgccagtaactgagtcatatcaaccatcaataaaaacgtctgccagcgctttatggcagagcaataaagagagactttccagctcgggccatacggagtgcccgtaatcctgcttgaaggtgagttcggcacgggtcagcaacgtgacggcctggcgcagctggtcggcgctgaggcgggccagcgcatcgctaaccagctggcggcggttctgccacacgcgatgtttgtcaaacagcgaacgcagcggcgtatgggccgactgccgcttcaggttgaccagcagcagcagctcgcgctgtagggtgcgcagcaggatggcgggctcgctgccttccagacgcagctgttgcagaacgtggagtacgcgcttacttttcccggccagcagcgcatcaacccagtgatagggggtgaaatgcgcggcatcattcaccgcctgctcaacccgcggcagcgtcagtttaccgtccggccacagcagcgacagacgctccagagcctgcgccagcgccagcagattaccttcatagcagtagcacagcagctgactggccgcgtcatcaagctgcagattattctgcttcgcgcgcgtggcgagccagcgcggcagctgggcatattccggcgtctggcagcttacctgcaccgcccggctggtcagcgccgtcatccacgcggcgttctcctgcgctttcgtcagcttattaccgcgaacgatgagcaataaatcgtcatgcagcatgccgacaagcgtcgcgagctgttcgttaattgccgcattagggccattatcgggcaggatgagcagcagcgtctggcggctggaaaacaggctcatggcctgacttaacgagaacagggcaggccagtcggtactggcatcaacggtggcggtgtgatgttcgataaagccctgggcggccgcggcttcgcggatggcgtcctggctttcctgcaacagcagcggatcgttgccaagcagcagataggccgcgcgcagcccttcagtgagctgcgcgcggagctgttccgggtacaaccgaatcatcagttacccagcgtggtggagacgcgattgccggaggttgaagcggctggggtcgtcgtgaccggcttctcatcctctttggtggcttcgacatccgcaacgtgtacgctcggcagcttacggatcagctgctccgcggctttgtcgtacatttcctgaacgatcatgtcctgctcggcatctttcgctaacgccgcctgcgggttatcgaagaacgagcggtagactttggtcgtgatgggatagatatcatggcctgggatcaggacgctggcatttaccgtcatcaccatctgatattccgcagtacggccgtcctggaaaatagatgctgtatctttctgaatggacgatgtctccagacgcagggaaggaatatccttgcgcagggtactgctatcgaccagttcaacgccgttcagacgcagctgattacggacagcacgacttaatggtccattgggatcgcccgactggaagatcatggttttcattgcggtcggaacctgcgtagtgctacgcaggtgccagccgcaaccggcggtgattaacaccgccaaagataacaacaatgttgccagatatcgcacgcttcctcctgcgcttagccaacgaccagattgagcagtttacccggaacgtagatcactttacgtacggtcacaccgtcgagatatttcgcgaccagatgctcctgacccgcgcgctcacgaacctgctcttcagttgcatccaccgcaacggtaattttaccacgaactttaccatttacctggaccacgaccagagtcgtgtcttcaaccattgcgctttcatcagcgaccggccacggcgtgttgtcaatatcgccttcgccgcccagctcctgccacagggtaaagctggcgtgcggggtgaacgggttgagcatgcgaaccacggccagcaaggcctcacgcatcagcgcgcgatcctgatcgttttcctgcggcgctttcgccagcttgttcatcagctccataatcgccgcaatcgcggtgttgaaggtctgacgacggccgatgtcatcggtcactttcgcgatggttttgtgcacgtcgcgacgcagcgctttttgatcttcgctgaggctggcaacgtccagcgcaggggcttcacccagggtggtgtgttcgtaaaccagtttccagacgcgtttcaggaagcggttcgcaccttccacgccggattcctgccactccagcgtcatgtcggccggagaagcgaacatcataaacaggcgcacggtgtccgcgccgtagcgttccaccatctcctgcgggtcgatgccgttgtttttcgacttggacatcttgctcatgccggtatagaccagctcgcgaccctgcggatcgaaggctttaacgatacgccctttctcgtcgcgctcggtggttgcctctttcggagagacccagttacgctcgccgttttcgccaacatagtagaaggcatctgccagcaccatgccctggcaaagcagctgtttagccggttcgtcagagttcaccatgcccgcgtcgcgcatcagcttgtggaagaagcggaaatagagcaggtgcataatggcgtgttcgatgccgccgatatagatatcgaccggcagccagtagttggccgcttccgggtcgagcataccctggtcgtactgcgggcaggtgtagcgcgcgtagtaccaggaggactccataaaggtgtcaaacgtatcggtttcgcgcagcgccggctggccgttaacggtggttttcgcccactcaggatcggctttgattgggctggtgatgccgtccatcacgacgtcttccggcagaataaccggcagctgatcttccggcgtcggcatcacggtaccgtcttcaagggtcaccattgggatcggcgcaccccagtagcgctgacgggaaacgccccagtcgcgcagacggtagttcactttacgttcgccgacgccaagagacgcgagcttatccgcgatggcattaaagccagcttcgtgatccagaccgtcgaattcgccggagttgaacagcacgcctttttcggtcagtgcctgttcggagagatcgggttcggagccatcagcggccaggatgaccggcttgatgttgagaccgtacttgctggcaaactcgtagtcgcgctgatcgtgacccggaacggccatcaccgcgccggtgccgtactccatcagcacaaagtttgccgcccataccgggatcgcttcgccggtcagcgggtgaatcgctttatagccggtatcgacgccttttttctccatggttgccatttcggcttcggcaactttggtattacggcattcgtcgataaacgtcgccagcgcggggttattggctgctgcctgctgcgccagcgggtgacccgcagcgacggccaggtaggtacagcccataaaggtgtccgggcgggtagtataaacggtcagcttgtcggcgtagtcgttaacgtcgaaggagatttcgacgccttcggagcggccaatccagttgcgctgcatggttttaacggtatctggccagtgatccaggttatccagatcgttcagcagctcgtcagcgtaggcggtgattttgataaaccactgcgggatctctttacgctcaactttcgtgtcgcagcgccagcagcagccgtcgataacctgttcattcgccagaacggtctgatcgttcgggcaccagtttaccgcggaggtttttttatagaccagcccctttttatacagctcggtgaagaacttctgctcccagcggtagtattccggggtgcaggttgccacttcacggctccagtcatagccgaagcccagctttttcagctggtttttcatgtaggcgatattgtcgtaggtccacggggccggagcggtgttgtttttcaccgcggcgccttccgcaggcagaccaaacgcatcccagccgataggctgcaggacatttttgcccaacatacgctggtaacgggaaatcacgtcgccgatggtatagttgcgcacgtggcccatgtgtagtcgaccagaaggatagggaagcatcgacaggcagtaatacttctctttgctctcgtcttcggtaacttcaaaggtacgcttctcgtcccagtgttgctggacttttgattctatctcttccgggcggtattgctcttgcatggcagccagtggtcctgttttcaatacagctacaaaatgtagccaatggatgtgttatttcagatcggcatagcatagcccaaacgccaacgtcaaaacagcctttcacacacttacagagatgaaagcggtggagaatatttcgtgactctgtgggttggctggcagagcaatccgcagataacgtctatcataagaagaagttaaccacaccggaggcgaaaagatgaacaaggttgctcaattctaccgagagctggtgtcgacgctcagcgagcggttacgcaatggagaacgcgatattgatgcgctggtggagcaggccagggtcaagattagccagtccggcgagttaacgcagagcgaaatcgagaatgtgatccgcgcagtcagacgcgacctggaagagttcgcgctcagttatgaagagagccaggatgagctgactgatagcgtctttatgcgggtgatcaaagagagcctgtggcaggagctggcggatattaccgataaaactcagcttgagtggcgcgaggtgttccaggatctcagccaccacggcgtctatcacagcggcgaagtcgtggggctcggcaatctggtgtgtgagaagtgccattaccatctgccggtttatacgccggatgtgctaccgcgttgtccaaaatgcgggcacgatcagttccagcgccggccattcgagccgtaaatacgcggtagatatctgcggagccttttacacaggcgttaagccagcccgagagccaatataaagcgcgttgatatattggccttcctttttaaagggcaggctaacccttcatcagtatgcataaaaatgctggtgccgaagcaccagcataaggtctttattaaaaagagaagcgcatcttcgatgataacgtcatgttaattgatagtgttaatggtcgcgctcttaaactgctgagtgccccccatttcactggcgtatttatgtgatgaatttaaaaccagattattagtggaaatcgtgcctttgccacaggttgccagattaaggaaaccgcagcgataccctccgttaaccactttttttgccgtcatggttaaagtgccgtcagccctgataagagaacggtttgtgatatcaccgtaattttgggtatccagcgtcatatttgatgagcttgaaatttcaccttcattataaagctcgtgataggttttaacgccaacattatactgaccaacaatagccccatagttgtgggtgacatagttatcaatagctattgtattcgccccgatgtagccttcattattaagcaggtagctttttgttgtcagcgtatcagcagcttccataaaactccctttttttaatgccagagtaccattggtttttatggtcacgttgccgccggaggtagtaccaaagttgctaatctccccggacgtcatctgttcatttttttgcgcctgaaccagcagagtatcgtagccaaaaatattgccagtgactttaagcgaatcccccccaaaggtcaccgttgtgtttttacttctggttgaacctccgttgtcaatattaccggcagcggtgactatcagctgattatctgaaagtaaactggaaccatacgttgttttcaggttaccgttagtcattacgttcaatgtggtggatgctttgaatttacccgtattttcgatatttccggatgcgttgactaataaatttcctgtgctggaaatggttccactattgcttatcgaactgaggctgttcagtagggtgatattattcgaggatatatttcccgtatttttaaaattgcctgcagagactacctgagtcatcataccattgctggcgatagagccttcgttggtgagtgagccaaagctggtcaaagagaggctggtgttagcaacaatagcgcctttatttcgaacgccaaaacctaaattattgccaaccatagtaatactattggctttgatgccaccaagattactaatgtcgatactatattcagggtaaagatactgcagcgccgttgctgatttacccgctgaggttatcgcgcctgagccgttatcaaacgtgaagtttcctgcacccactattgcgttctttgcattaaccgcaccgttaatggctatcgcatcggcgagcagtacagcatagctattgctcgcatccattccttttttgtcgatggacaacttgccaccggttacgtcatagctggcgatcgcgccagtatcagaaaaagtcacctttccggtcgttaaaatcgccttattggtgttaatgaaactacatcctgagcaggaaatgccattggggttagcaataacaacatcagcgcgttgacccgcgacttcaataaatccattcagtgagctggcacgatttgaggtgacttcgttaagaataacagaagcactaccattggtcagattgttatttttagcaatatttcctaaggtcccgtgtgtgagatcgctggtgctattgttaagaacgacacctttactatcaacgttaaactcacgatacatattatgtgagacgccggcggcattgggtttttcaatatcgatgaccttgacgcctgataaatgagtataggttgtcgggtcggcataaacgaaggttgagctcaaggctgctgctagcacaacataggataatttgaatttaaacatttaatatagtcctttaaaaataaatgaagttaaccgatacgttgaaaaactgactttaatacctccattgtaatgaaaaccccaggttcacagggtctgtatgaaaaccgtttggctttaccaacggtgttcccaggaaaaaatcatattgagtagcaataacgctcccgcgcactcccatactggcgccagatatgactttgccatttccgtactgttctgttcctgtaatgcgcccaacatctatgcctaagtacagctgttgttccggggcgggcatatcccagatgaaatcattgcgccagtaccagccttgatttcctgaaagggttctttcaccgtcaaagcctcgtaccgtccagcgattacctatattaaattgattatctacggataagatgtcgggactgatttgtatattgacatgtggggcatagctgaatttatctcccgtcaattcaaacttcattagggcttgaaggtcggcatgaataatgcgcgaaagcttactgtacagaccggctttttcctcaggggttggtactgaactgagccacggaaggctacgctgtacgcccaggctggcatctatgattgtatgagtaaaatatcgttgttgatgtacagtaatatcccaggcaggattctgtttgcgcataacgctcaattcactaccgccaaaatagtaatgtgaggtgcttttagatattcgcgcatcaacagtcgttttttgctgacgggtatgcgaaagtaaatgcgttaaggttgcgctggcataatcatttttgcttttatattcaatggtagagtatctaccattgaactgctgacgatattcactttgtgaaccgtaaagattgagcgaccaaaatccaaagggaatagaataatagaggcttttattctgattaccatcgttatgttgattaaactcgacatcgccccccatggataaatagagtatgtcatttagcgtcgtcaggtcgtaaagataaagcgcgccaccggcctggtaacgcccgctgctacggcttccggcatcatccagccatgcgcctacttgccagtttcgtgccagatgccgggatatttggatgtcgctttccgcattgttcttacccggcatgattttcatctgcgccgatgagccgggtaaacgctgtaagttagccattccctgttccagttcggttagcttcaggatatctcctgttttagccggtatggcattccacaggctggttgtcgcgctattgtcggaagcccagctaatattaccgatatagccatagctcaacgtgatgctcagaatgccatcattcagggactgtgaaggtacatcaataagcgacgtgatatatccccgggcaataagttcattttgcaaggttgtggtgagtagacgtatgccttcaatacccagacactttttttcagcctggcgagcgatattacctaacagaccgagggtcagcttgtggtcagcggaaataatttcaacatggttgatatatcgacaggttgcttccagtggaaaggcaagtttatatttttgcgatcctctacctgatgccgaatattcctgctgtgctggtgccaatgcgctttgacgtgccttatcctgttccacctgattggtattactaatcgatacattcgccaatgtcgacgcggttagcagaatataaagagaaagggcggttatgagacttttattattcacgaagcaatatccatttgtttcattcgtccgttatagccttgtcaagaatgtttagcgttcactgagtatggttaacgaagccgggtactcaatcttaagaatcttacttttctaaaatcaaaaaaaaacgctgccggtgctcagcgctgttgtcaaatctgcgccatgttatctacggcagattaggtaatccacgatgtaaagcgtgaatttttgttgaattgagcgtttcaggtcgtgaattatttggcgtgaggctggatatatttatgacgcgtatttgagagcaacgaaactattgccataactatggagagagacaggagcgggaagagataaaggcgtgtacggtaccgtacacgccggaaggttagtgcagaattttggcgaggaagtctttggcgcgttcagattgcgggttagcaaaaaacgcttctttatcggcgtcttcgacaatttttccttcatccataaagataacccggttggctaccttacgcgcaaagcccatttcatgggtgaccaccatcatagtcatcccttcgttcgccagttcaaccatgacgtccagcacttcgttaatcatctccggatccagcgcggaggtgggttcatcaaacagcatggcgataggatccatacacagcgcgcgggcgatggccacgcgctgctgttggccacccgagagctgggcggggaatttttcggcatgagcggaaagccccacgcgttccagcagcttaagcccttttgcccgggaggcggctttatcgcgattgagtaccttgacctgcgccagggtgaggttatcgataatcgataagtgagggaacagctcaaagtgctggaataccatcccgacgcgcgagcgcagtttggccaggttggtctttttatcgttgacggtggtgccgtcgacgatgatttgaccttgctgaatgggctcaaggccgtttacggttttaatcagcgttgatttacccgagcccgaaggcccgcagaccaccaccacttcgccttttttcacttccgtggagcaatcggtcagcacctgaaagtgaccataccattttgaaacatttttcagggtaatcattacacagtccttttcttcaaccagctgaccaacagcgatgcgctgagactaaacacaaaatatacggcgcctgcgaacaggatcatctctacctgggttccatcacgctcgccgatagtcgaggcggtgcggaaaaagtcggccaggctcaggacatagaccagcgaggtatcctgaaatagtacgatgccctgagtcagcagcagcggtaccatggcgcggaaggcctgcggcagaatcaccagcttcatggattgccagtgggtcatgcccagcgccagcgcggcgctggactggccgcgcgagatgctctgaatgccggcacggataatttccgagtaataggccgcttcaaacatggagaaggcgatcatcgctgaaatcaggcggatatcggttttcggcgacaggccaagcacgttctgcaggaacccgggaacaatcagataaaaccacagcagtaccatcaccagcggaatggagcggaaaacgttaacgtaggttttggcgaaccacgccagcggcaggaagctcgacaggcgcataacggccaggatcgtcccccacacaatcccgacaacaatcgcggtcacggtaatttttaaggtaatcaccagccctgccagcaggtatggcatggaaggaataatggagctccagtcaaaatcgtacattatttaccccccatattgcccggcaggcggaatttacgttcgaccacgtacatgatcagcataataacggcgttgataaacacgtaggcgagggtgatagcggtaaacgattcccaggcatgggccgagtagtccagcagcttacccgcctgcgcggccatatcggcaagaccaatggtggaggcgatggccgagtttttcaccaggttcatcatttcagaggtcattggcggcacgataacgcgataggcgttgggcagcagaacgtaacggtaggtttgcgggagcgttagccccatcgccagcccggcgtttttctggccgcgcggcagggattgaataccggaacgaacctgctcgcagacgcgcgcggcggtaaacaatcccagacacagcatcgaagaaacgaaaaactgaatattcggatccagctcggacttaaaccacatgccgatgttttccggcagcagttcaggcaccaccagataccaggtgaaaaattgaacgataagcggaacgttacgaaaaagttcaacgtagcaggtgccgatagtcgacagcagacggttcgggaccgtacggagaataccgaagagcgaacctacaaagaacgcgataatccaggccgttaccgacagggtgacggtgatctgaaaaccactccacagccagcctaaataggtggtgttgccgaacggggcctgttgcaggaatatcccccagttccagtctattgacataaatgactcctggaaaaaaaagggtagcagcgctaccctcgaagattgttgctcagcctgtttcggtattcgcggccgctggggaacgaccagccgccgtatagtctgtccgcgccgtagcaacaatcgggagggcaggattccccgccctttgtttttttaattagttaagagctttatcgttaggtgatttgaacagcgctttcatctcgtcagagagttcaaagttcatattcaggttctttggcggaataggatttttaaaccacttatcgaaccatttttcggcttcaccggaggtctgaacctgggcgaccgtctcatcgaccagcgttttgaactgcgggtcatctttgcgcagcatgcagccgtaggcttcctgagactgagcggtaccgacaatctcccagttatccggtttcttcgctttcgcacgttcgcccgccagcagcgcgtcatccatcataaaggccaccgcgcgaccgctttccagagtacggaaagagtcaccgtgatcttttgcgctgataatacgcatattcatttttttctcgtcgttcagcttgtgcagcagaatttcggaggtggtgccggaggtgacgacgacggctttatccttcagatccgggaaatctttaatcgcgccgccttttttcaccagcagacgggtaccgacgacgaaaatcgtatcggagaaggccgcctgtttctggcgctcaaggttgttggtggtggagccgcattcgaaatcatacgtgccgttttgcagcagcggaatacggttttgtgaggtaaccgggatcagtttgacctgcagatccggtttgttcagcttcttcttgatggcatcaacgatcgcattcgagtagtcctgggagtagccaacgacctgctgcttgttgtcatagtaagagaacggaacggatgattcacggtgaccaacgacgataacgccgtttttggcaattttatccagagtgctctggccagcggtggatgccgcatcttctgcatgcgccaccccagcggtgaggcccatgaccagcattgctgcggccagtttacgtaattgcatatccgactccttatcctcagcgccgtcagacgctattgatacccattgtgaatgtgtgtgcttttttatcgctgccgtctttgcgtgcagcatttgtatgtgtttgttagcatttagtttggcttaatgtaaagattttgctcttatattgttgatttttgcgaagcgcaccgcaccatttaaaggcaaaaatcccccattgcaccaaaatagcgccgcctgacgatcgatggtggtgcaaccgggttgtacccccgaggatcgcgttgcgacatgaatttattaagcaatggtcgtgccagaatggataagaaggggggatgaccgcggcgacgaatgccgccgcgggagaagcaattattgacggcgctggcgcaggctcatcagcagcgcagcaaagccaaacaaggcggttaacgcccacagcggccagttccccgtacgcgcgtacggcgtcagtcctgccgttggggtcactttggtggttaatacggcgcgggtgaactgtgggatcatctcctgtatttcaccgcgcgggccgatgaccgcggtaatgccgttattggtgctgcgcagcagcggacgggccagctccagcgcgcgcattcgcgccatctggaagtgctgccacgggccgatagatttgccgaaccatgcgtcattcgaaatagttaacagaaaatccgtatccgggcggaagttatcccgcacctgctcgccaagaatgatctcgtagcagatagccgccgtcagacgcatattatgcgccaccagctgcggctgcacgtacggcccgcggctgaaagaggacattggcaggtcgaagaacggcgccagcggacgcagaatcgattccagcggcacaaactcaccaaacggcaccagatgattcttgttgtagcgattctttgagtcgtagctgtacgggttatctttgcccagcgtaataatggtgttgtacgtatcgtagcgattgcgcgcgttcagacgcgcatcgacgatgccggtgatcagcgagctatttttcgaccgcatcaggtcatccatcatgctgaggaagcgctgctggttaatttccagatccggaatcgcggactccggccagacgatcagctgcgatttacccatatgcggctgggtgagatccagataggttttcagggtgttgagcagctgattctggtcccatttcatcgcctgggggatatcgccctgtaccagcgaaaccgtggtcgcgcgcgccggcagcggttgataccactgaatatagcgaagcgggaagggcagggcgaacagcaagacggcggcgatcagcggcttccagttacgctgcgcgatggccaataccagcaggccgctgacaagcatcagcaggaagttaatcgcctcaacgcccatcacgggagccaggcctttgagcgggccgtcaatctgactgtagccgaactgtagccacgggaagccggtgagcacccagccgcgcagaaattcgctgatttgccacaccaccggcgcggcgatagccacgcgtatccagctggtttttggccacaggcgcgaaagaatgccggcaaataatccggtatagagcgacagataggccgccagcagcaccaccaggaaaacgttgaccggaccgggcatgccgccgaactgcgcgatgctcacgtagacccagttaataccggagccgaacagccctaacccccaggaatagccaatcgcggcgctttgcaggggacgtcggttgagggttaaaccttgcaggccaattaacgaaataagggcagctggccagaagtcataaggtgaaaaagccagcgttccgctggctccgaataacagcgccagcagcaaacgtacgcgctggcgttcaataagagaggcaaataccatttaggttaatcgtcccgttggattagtcttccagcttcggctgcggggcatcatcaggaagctttacatgtacctgaataatacgtcgactgtcagccattgcgaccttgaattggtaaccatcaatgtcgatagactcgccgcgggcaggcagatgaccaaacgcctgcatgaccagaccgccgatggtgtcgacctcttcatcgctgaagtgggtgccgtacgcttcgttgaaatcttcgattgaggccagcgcgcgcaccgtccacgtgtggcggctcagctgacggaaatcgatatcttcttcttcgtcgtattcgtcttctatttcaccgacgatgagctcaaggatatcttcaatggtcaccagacctgagacgccgccaaactcatcgataacgatagccatatggtaacgttgggagcgaaactccttcagcatgcggtcaacccgcttgctctcgggcacgacaaccgccggacgcaacactttttccatgctgaaggcttcggcatcgctgcgcataaacggcagcagatctttggccatcagaatcccttcgatgtgatctttatcttcgctgatcaccgggaaacgcgagtgggccgattcgatgatgacatcgaggcactcgtccagcgtctggttgcgtttcagggtaatcatctgcgagcgggggatcatgatgtcgcgaacgcgctggtcggcgatatccattaccccttcgagcatatcgcgcgtatcttcgtcgataaggtcgttttgcccggaatcacggatcagcgccagcagttcgtcacgatttttgggttcaccgtgaaagagctggctgagtaacagggagaagaatccctttttgctgtttactgtgtcgctactgtgtgaattgtcgtcgctcatggcgtcgtatgggttctcatgttagttaaatagtcgctcgtcacgcgtatactcagcgcccggcatagcggccagtcgccggcaaagccggcaacgggttattccttctcggcaatgtacggatcctcatagcccagagcaagcattatctctgtttcgagggattccatctcttccgcttcttcatcaatgatgtggtcatagcccaaaagatgcaggctaccgtggaccaccatatgcgcccagtgcgcttccagcggtttaccttgctctttcgcttcctgttcaaccacctgacggcagatgaccaggtcgccaagcagcggcatttcgatacccggcggggcttcgaacgggaaagagagcacgttagtcggtttgtccttcccgcgataggtcaggttcagctcgtggctttccgcttcatcaaccaggcgaatcgtcagctccgactcttcctgaaactgcgggataacgctatcgacccagcgctgaaacagggcttcatccggcattccgctgttatcttcgcaagccagctgtaaatcgagaatgacctgactcatttatgctcctgttcctgggcttcgcgtttgcgctcggcggccagttctgctttacgtttctggtctgcttcttcccaggcttcataggcgttaacgatgcgggcgacaaccgggtggcgcacgacgtcttcgctatggaagaagttgaagctgatctcatcgacttccgccagcacttcaatcgcatggcgcaggcccgatttggtgctgcgcggcaggtcaatctgcgtgacgtcgccggtaatgaccgccttagagttaaagccgatacgggtcaggaacattttcatctgttcaatggtcgtgttctggctttcgtcgagaatgataaacgcatcgttcagcgtacggccgcgcatataggccagcggcgcgacttcaatcacgttgcgctcaatcaacttttcgactttctcgaagccgagcatctcgaacagcgcgtcgtacaggggccgcaggtacggatcgactttctggctcaaatcgccgggcaggaagcccagtttttcgccggcctcaaccgccggacgggtcagaagaatacggcggatctcctggcgctccagcgcgtctaccgcggcggcgaccgccaggtaggttttcccggtcccggcaggaccgacgccgaaggtaatgtcgtggtcaagaatattggcgatgtactgcgcctgattcggcgtacgcggtttaatcacgccgcgcttggttttgatattgatggccttaccgtagtccggcacgctttcggcgctctgctccagcacgcgggcttctttgatcgccagatgaatttgttccggttcaatatcctgaatttcgccgcgcatcggcgcggtatcgacgtacagactgcgcaggatatccgccgcagcggtgacgcaaatcggccgaccggtcagtttaaagtggttgtcacgacggttaatctcgatgccgaggcggcgttccagctgtttaatgttgtcatcaaacgggccgcacaggctcagcagacgggcgttgtccgcgggctcaagggtgatttcgcgagtgtctgtattcaagctgttcctcttatacatagatagccggaaggtagccggtcaggaaattattcacgtcatcggaatatggcgcaagcatcgctatagatattgggttcaggagaggaaatacaaggcctgccggagccggcaggcctgaacggattatggctggtagataccgacgccaagatcgttttctttacgggtgcgggcaattaccgactccggggtttccgcgatgcgcagacccatttcgtcctcggtgcgcaccactttaccgcgcagggagtttgtccagacgtcggtgatctcgacatcgacaaacttgccgatcatctcaggcgagccttcgaagttcaccacgcggttattttcggtgcggccagacagctccatgatgctcttacgtgaggtaccttccaccagaatgcgctgcacggtgccgagcatacggcggctccaggccatcgcctgctggttgatgcgctcctgcagaatatacaaacgctgcttcttgtcctcttccggtacgtcgtcaaccatatcggccgccggcgttcccggacgcgcggagaagatgaagctgtagctcatatcgaaattcacatcggcaatcagcttcatggtctgctcgaaatcctgggtggtttcgccagggaagccgacgatgaagtcggagctgatctgaatatccggacgcgccgcgcgcagtttgcggataatcgctttatattccagcgccgtgtgggttcggcccatcaggttcagcacgcggtcggaaccgctctgcaccggcaggtgcaggaagctgaccagctccggcgtatcgcggtaaacctcaatgatatcgtcggtgaactcgatgggatggctggtggtaaagcggatccggtcgataccgtcgatcgccgcaaccagacgcaggagatcggcaaagctaccggtggtgccgtcatagttttccccgcgccaggcgtttacgttctgcccgagcaggttgacttcacggacgccctgagccgcaagctgggcgatttcaaacaggatatcgtcgcttgggcggctcacttcctcaccgcgggtgtaaggcaccacgcagtaggtgcagtacttgttgcagccttccatgatggaaacaaaggcgcttgggccttcggcgcgcggttccggcaggcggtcgaatttttcgatttccgggaagctgatatcgacgaccgggctgcggttgcctcgtaccgagttgatcatttccggcagacggtgcagggtctgcggcccaaaaataatatcgacgtagtgggcgcgctggcgaatatggtcgccttcctgagaggctacgcagccgccaacgccgatgatcaggttgggattcttctctttcagcagcttccagcgtcctagctgatggaatactttttcctgagccttctcacggattgagcaggtattgagcagcagcacatccgcttcttccgccacttcagtgagttgatacccgtgggtggcatccagcagatcggccatctttgatgaatcgtattcgttcatctgacagccccaggttttaatatggagtttttttgtcatcgacttgctcatgcttaattaggtatacccaaagtcagcgtcttcaccggatgttgctctgcaatgtgaagggtgacggatataaagccaggattgcagggcgcgtattgtaatgctttgaccgcgccctgaccagtacgaccgtaatcaccacaagccgaataaaaatccggtaaactgaggggattcgggtttaaggataatagccatgacaattcatgcaacagatgtcgttatcgtcggcggcgggatggttggcggcgccctcgcgcttggcctggcgcagcagggctttacggtgacggtcattgaaaaaaacgcgccaccggtttttgatgcgtcttcaccgcctgacgtgcgtatttcggcaatcagcgcgtcatcggtagggctgctgagaggcctcggcgtctgggacagcgtgcggtccatgcgcgcccatgcgtaccgccagctagaaacctgggagtgggaaagcgcgcatgttgtcttcaacgccgcggagctgaagctgccggaactgggctatatggtggagaataacgtcctgcagcgagccctgtggcaggcgctggaagcccatgagcgcatatcgctgcaggtgggaacatcgctccaggagatgcgtctggaagaaacgtacgcctccttaacgctgaccgacggcagccagcttgatgcgcggctggtggtgggcgcggacggtgccagttcgcaggtgcgtcagctggccggaatcggcatccacgcgtggcagtaccagcaatcctgtatgttgatcagcgtacagtgtgcggacgatcccggcgacagcacctggcagcagttcactccggcggggccgcgcgcgtttttaccgctgttcgatcattgggcctcgctggtgtggtacgacgcgccggcgcggatccgccagctgcagggcatgagtatggctcagctacagcaggaaattactcgccacttcccgtcgcggctgggagagattacgccgctgagtgcgggcgccttcccgctcacccgccgtcacgcattgcagtatgttaagccggggctggcgctggtgggcgatgctgcgcacaccattcatccgctggcggggcagggggttaacctcggctatcgcgatgtcgatgcgctgctcgatattcttggcagagcaaaagcccgcggcgaagagtgggcccgcctggcggtacttaagcgctaccagacgcgccgtcaggcggacaactttattatgcagtctgggatggatctgttttacgccgggtttagcaacgatctgcccccggtgcgtatgctgagaaatattgggctgatggcggccgagcgcgccggcggactgaagcgtcaggcgttgaaatacgcgttgggattgtaacgctggacgacccggctggcgaaggcgcggccgggtagggatgctaatagacgtagccaaaatccataaagcaaaaagcccgccgaagcgagctttttgctttatgttggctggggtacgaggattcgaacctcggaatgccggaatcagaatccggtgccttaccgcttggcgataccccaattttacgttgaccatttcgtaccggggtcaaaccggtggcttagcgcctggagatactccaacgggtgcgcgcacagcgtgggcgacttttaaaattggctggggtacgaggattcgaacctcggaatgctggtatcagaaaccagagccttaccgcttggcgataccccaacaattcttttggatttatcgaactgaatcaataattcctttgtatggtggctacgacgggattcgaacctgtgaccccatcattatgagtgatgtgctctaaccagctgagctacgtagccaaaatcttactctattttcgatggctggggtacctggattcgaaccagggaatgccggtatcaaaaaccggtgccttaccgcttggcgataccccaataccgtcgcggtgaaccgcaaacatcgaaaatatggctggggtacctggattcgaaccagggaatgccggtatcaaaaaccggtgccttaccgcttggcgataccccaacaaaaatcttttaccgcaacgcgaacgagtaaatggtgcgggaggcgagacttgaactcgcacaccttgcggcgccagaacctaaatctggtgcgtctaccaatttcgccactcccgcaaaaaagatggtggctacgacgggatttgaacctgtgaccccatcattatgagtgatgtgctctaaccagctgagctacgtagccatctttttgcgcgttaccttatcggcgttgcggggcgcattatgcgtattgagccttgaagcgtcaacccctttttcatcgaaaatggactgaacgtaactgtttggttaggttgcgaacagcgtggtgcaataatcggcaattattggttatttatcgtttttaacggcttaaataaggcacaaaacaaaaacggaccccgaagagtccgttttgaaaacagcgtcggttagtaggccgactggtgtacgccaaccgcgcgtcccgacggatcgttcatttttttgaaagattcgtcccactcaatcgcttttgctgaagagcatgcgacggaagggccgccaggaacgcattcggccgcgctcggtaccgggaacagctcttcgaaaatctcacggtacagatacgcttctttcgaggaaggcgtgttgtacgggaaacggaagccggcggtttccagctgccgatcggaaatctgttcagcggccacttcttttaaggtatcgatccagctgtaaccaacgccatcagagaactgttctttctggcgccaggcgacgctcgccggcaggtaagattcaaaacattcacgcaggacatgtttttccattttaccgttgccgcacattttatcctgcgggttaatacgcattgccacgtcgaggaatttcttatccaggaacgggacgcgcgcttcaacgccccaggcggacatcgctttgttggcgcgagcacagtcaaacatatgcagcgcctgcagtttgcgcacggtctcttcgtgcagctctttggcgttgggcgctttatggaaatagaggtagccgccaaatacttcgtcagaaccttcgccggacagtaccattttgatgcccatggctttgattttacgcgacatcagatacattggcgttgacgcgcgaatcgtcgtcacgtcgtaggtttcaatgtgatagataacatcgcgaatcgcgtccaggccttcctgcaccgtaaagtggatctcgtggtgcacggtacccagatggttagccacttcctgcgcggctttcagatcgggggcgccctccaggccgacggcgaaggagtgcagctgcggccaccaggcttctgatttttcctgatcttcgacgcggcgcgcggcatattttttggtgatggcggaaatcaccgatgaatccaggccgccggagagcagtacgccgtacggaacatcggacatcaggtggctttttaccgactcttccagcgcctgacgcagttcgtttttgtccgtgacgttgtctttcaccgcgtcgtagtcgaaccagtcgcgctggtagtactcgcggatttcgccatctttgctccacaggtagctgcctgccgggaactctttaatcgtgcggcaaaccggaaccagcgctttcatttcagaggcaacgtagaagttaccgtgttcgtcgtgacccatatacagcgggatgatgccgatgtggtcgcgaccaatcagatacgcgtctttttcgctgtcgtagagagcgaaagcaaacatcccctgcagatcgtcgaggaagtccgggcctttttcctgatacagcgcgaggataacttcgcagtcggaaccggtctggaacgcgtagcggtcgccgtattccgcgcgcagcgcctggtggttgtagatttcaccgttgacggcgagagcgtgagttttagcggcgttatacagcggctgcgcgccggcgttgacgtcgacgattgacaggcgttcatgcgccaggatggctttatcacaggcatagacgccggaccagtccggaccacggtggcgcatcagtcgggaaagctccagtgcctttttacgcagctcacccgcgtcagttttaatatccagtacgccaaaaatcgaacacatagccttctccgttaccctgtcttgtttgatgttgtgcagacttcgtcttattgcgaagcctcagtgcatgctttagaaaatgccgcaaaggcgcggagggcgcaaggggtttacggctggaaaaggaaataatgcaattgtgattgtcgaatagtgaaaaaagagtacgttttgagcgcttttgttgctgaatatttagtgatggcgctttttttttagataaaagcgttcaggagaggcttaggaataagaaaccacgtcgcaggacgtggttttattgtcatccctaaaccacctcctagggaggtggtgattgctcctgtaaggctatagcctgaagaatgcccatgtcggaatatctctgcttactcaccacaagtaaaaggagacaaaccgacatgggactttacaggagttcatcacatgtatattggcgttgcaaataccacatagtctggacacccaagtaccgattcaggatcctgaaagataagctgggtaaggagctgtacaggacgatctatatcctctgtggaataaaggattgtgaggttctggagctaaatgttcagcccgatcatgtacatctggtcgtcatcattccaccaaagatctcgatatcaactctgatgggccatctaaaaggacgcagtgccatcaggctttataaccgttttccacatatcaggaagaagctatgggggaatcatttttggtcgcgaggctactttgtcgatacggtgggagtgaatgaagaaattatcagacgatatgtgaggcatcaggagaaaacggaacaaacgtatgaacagcagatggaattgctagagtaatcagcggcaggtgacaatagccccccttacagggggcattctcaaaagccaccttctcagaaggtggtcttttacttagaagatatcgatttccgcaacggagggataaatccaggaagggcggaacggcatgctgtcgatatcatcgagcgtggcaaccccggaaagcaccagaatggtttccagaccggcctggaagcctgccagaatatccgttcgcaggttatcgccgacgattaccgtctgttccgaatgcgcctgcattttattgagcgcggagcggataatccacgggctcggtttccccacgtagaacggcttacgaccggagattttttctataccggcgcacagcgccccgcaggccgggtagtagccgcgaccgtgggtatccgggttagtggcgataaagcgcgcgccgttggcgacaaaaaaagcggccttatgcatcatctcccagttaaaggagcgcgtctcaccgacgataacaaaatccggattgacgtcggtgatggtaaagccggctttgtacagttcgtgaatcagcgcgccttccccgaccacataggcttttttgccttcctggcgacgcagaaaatccgccgtggccattgctgaggtataaaaggcggtatcaggaacatcgattcccgccgtcgcaaagcggtttgccagatcctgaccggtttgagaagggtagttggtcagcatcaccagcggcatctctttctcaagtatgcgtttgatgaattcagcggcgcccggcacggccacattgtcgtgcatcagcacgccgtcaatatcacaaattacgttttgaatggtcatgaactgtccgacatcgttggagaaaggcgaaactataaagcggctttagctttccagcaaacgctggagcagagtcccgttgagcatcgcacgctttaccaaggcaaaagcgccaatggctgagcgatgatcgagcgtggatcgcactaccggcaggtttttgcgaaacgccttcagcgcctgggtattaatacagccttcgattgccggcagaaggactttttccgcttccacgatctccccggcaatcaccaccttttgcggattaaacaggttaatggcgatagcgatggttttacccagatggcggccaacgtgctcgatcacctcacaggccagcgcatcgcctttattcgcggctttgcagatcgttttgatcgaacagtcatcgagggaaattttgctctgataaccctgttccagcagatgacgaacgcgatgttcaatagcggcattggcggcgacggtttccagacagccgaagttaccgcagtggcagcgctcgcctaacgggtcgacctggatatggccgatttccccgacgttaccgttacggccaataaaaatccgcccgttggagatgatccctgcgccggtcccgcggtgtacgcgcaccagaatggagtcttcacagtcgtggctcgcaccaaagtagtgctccgccagcgcgaggctacgaatatcgtggccgacgtagcaggtaactttaaagcgtttttccagcgcttcaaccagcccccagttttccacctgaatgtgcggcatatagcgaatgacgccgctttccggatcgaccagccccggcaggatcaccgaaatggcgatcagctcgcggattttacgctgacagctctccataaaggcggcgatgatgttaagcagggcgtgttccagcgtttcctgagttctttccggcagcgggtagtgctcttcttcaagagtcttgctgcttaaatcatagagggtcagggtggcgtcgtagcggccaaggcgtacgccgatggcgtggaagccgcgggtttcggcaacaatggagatggcgcggcggcccccggtggaggcctgctgatcgacttctttgatcagtccgcgttcaataagctgacgcgtaattttagttacgctggcaggggcaagctggctttgttccgcaatctggatacgcgagatggggccgtgctgatcgatgagccgatagacggccgcgctgttcagctgttttacgagatcgacgttaccaatttgagcctgtccgcctgctgtcatacttttacttactcagtgacgacctcgttaccattaacgatggtcttggtgattttataatcacgggtgaatgcggtcaggttagcgaccatccccggggcaatgctgcctaactgtttgtctacgccaatggcgcgggaagggtagagcgtcgccatacgcaacacttcatccagcgcgatgccgcaatgctcaacgaggttacgcaccccttcaatcatggtcaatgaagagccgctgagggtaccgttctcatctacgcacaggccgttccggtagtatattgttttaccggcaaaaatgaactgctcaatattggcacccgccggcgccgtcgcgtcggtaaccagacacagcttgtcgcctttcaagcgtttagcgaggcgcacgttagcgaaatcgacgtgcataccgtcgacgatgatgccgcagtagacatccggctcgtcgaaaatcgcgccagccaggcccggctcacggccggtaatatacggcatggcgttaaacagatgggtagcaaaggtaatcccggcgcggaaaccgattttcgcttctttaagcgtcgcgttggagtgaccggcggagacgatgataccggcggccaccagtttgcggataacctccggttccacccgttccggcgcaagcgtgattttggttatcacgtccgcgttttcgcacaggaaatccaccagcgcggcatccggtttgcgtacgtagtccgggttgtgggtaccttttttaacgatattcagccacgggccttcaagatgcagccccagcgcctggttaggatgtttttgcaggtattcgcgcatcacgcgtacgccctgtttcatcaggtcgtcgctggaggtgatcagcgtgggcagatagctggtgcagccggagcgttcattggccttctgcataatctccagcgtttcaacggtgaccgcgtccgccgtgtcgttgaactgcacgccgccgcagccgttaagctggacgtcgataaaaccgggggcaaggatcgcgccatcaaccgagcgctgttcgatcccggtgggcagttcagtctgaggacagatacgttcgataaggccattggcgataacaatcgcatggtcatccagaatttcgtgaccggtataaatccggccttgggttaatgcatacattacgacccccggttgtcaaaaatggttgtcccgcgggggcagccgcgggacgagactacattacagacctttgatattttcggcttctaactcgttgaaatatttcagtgtcttaactttcagttccatggtggacggctcatcgcagaccaccaccgctttcgggtgcagctgcagacaggtaatggtccacatatggtttacgttgccttccaccgccgcctgcagcgccagcgctttctgatgacccagcaccagaatcatcacttcctccgcgtccagcagcgtgcccacgccaacggtcagcgcgtacttaggcacctggtcaacgtcaccgtcgaagaaacgggaattcgctacgcgagtatcatgggtcagggttttgatgcgtgtacgtgaagccaaagaagaggctggttcgttaaaagcgatgtggccatcgttacccacgccgcccataaacaggtggattttaccgtaagaacgaattttttcttcatagcgacggcattctgcatcaatatccggcgcgttaccattcagcaggttaatattttccgccgggatatcaacgtgatcaaagaagttgcgatgcataaagctatgatagctttccggatgctctttcggcagcccaacgtactcatccatgttgaaggtgacaacatgcttaaagctaacctggcctgctttgtgcatctcaaccagggctttataagcggtcagaggcgtaccgccggtaggcaggcccaggacaaacggacggtccgcagtcggtttgaacgcattgatgcggttaacgatatgccgggcagcccatttaccgacttgttcagctgttaccagggggatcagtctcattgttcacctctatagttaaattagaacctggcggattggcgccagcatactattaagagtatcgcagcaactgcgccgagcggggtcaatccgtgttgattttttgaatgataaaataagttttcgttgttagccagtcaaaggcggaggtgaatacgatatttggtgactattgtcacaaaaaatacccatttaatttgcgagacgaattaatttttcagacactttgcaggtaagttaaaaatttaaccaggttacacaataataaagtgactttaatgagccttatcggggtctcatagggggaataagatgaatattttaggtttttttcagcgactcggtagggcgttacagctccctatcgcagtgctgccggtcgcggcgctgctgctgcgattcggtcaaccggatctgcttaacatttcgtttatcgcccaggcgggcggggcaatctttgacaacctggcgctgattttcgctatcggcgtcgcatccagctggtcgaaagacagcgccggtgccgcagcgctggcgggggcggtaggttacttcgtgttgacgaaagcgatggtcactatcaacccggccatcaatatgggcgtcctggcgggtatcattaccggtctggttggcggtgccgtctataaccgctggtcgggtatcaaactgcctgacttcctgagcttcttcggcggcaaacgctttgtacctatcgcaaccggcttcttctgcctggtgctggcagccatcttcggctacgtctggccgccggtgcagaacgccatccatgcaggtggtgaatggattgtgggcgcgggcgcgctcggctccggtatctttggtttcatcaaccgtctgctgatcccgacgggtctgcatcaggtgctgaacaccatcgcctggttccagattggtgaattcaccaacgccgctggcgccgtgttccacggtgatatcaaccgcttctatgcgggtgacggcaccgcggggatgttcatgtccggcttcttcccgatcatgatgttcggtctgccgggtgcggcgctggcgatgtatttcgcggccccgaaagcgcgtcgtccgatggtcggcggtatgctgctgtcggttgctatcaccgcgttcctgaccggtgtgactgagccgctggaattcctgttcatgttcctggcgccgctgctgtatctcctgcacgccatcctgaccggtatcagcctgttcgttgcgacggcgctgggtatccacgcgggcttctctttctccgcaggcgccatcgactatgtgctgatgtacagcctgccggcagccagtaaaaacgtctggatgctgattgtgatgggcgttgtgttctttgttatctacttcctgttgttcagcgcggtaatccgcatgttcaatctgaaaacgccgggtcgtgaagataaagcggatgacgtggtcactgaagaggccaacagcaataccgaagaaggtttaacccagctggcgaccaactacatcgcggcggtcggcggtacggataacctgaaagcgattgatgcctgtattacccgtctgcgtctgaccgtggcggactctgcgctggttaacgacgcggcctgtaagcgcctcggcgcttccggtgtggttaaactgaacaagcagaccatccaggttatcgtgggtgcgaaagccgaatccgtcggcgatgaaatgaagaaagtagttgcccgtggcccggttgccgcggcggctggagcgcctcacagcgcccccgtagccgctcaggccgctaaaccgcaggctgtcgctaacgcgaaaaccgtcgaagcgctggtttcgccgattaccggcgacattgtagcgctggagcaggtcccggatgaagcgttcgccagcaaagccgtcggcgacggcgtggcggtgaaaccgactgataagattgttgttgcgccggcggctggcaccgtggtgaagattttcaacaccaaccatgctttctgtctggaaactgaaaacggtgcggaaatcgttgtccatatgggtatcgataccgtcgcgcttaacggccagggctttaaacgtctggtggaagagggcgcggaagtgaaagcgggtcagccgattctggaactggatcttgcgttcctgaacgctaacgcgcgctcgatgattagcccggtcgtatgcagcaatagcgacgactacagcgcgctggttatccaggcaaccggtaaagtggttgctggccagacgccgctgtacgaaattaaaggcaaataagactcctgagtggcgtttatgcctcagcggcgcagcgaaacctgcgccgcttttttttaccgcaaacacccccataatctccttccgatcgctattttgcgtaactaatagttgtctctacgccctgcttgtaagatcatgtgccgttatacgttgtttacgctttgaggaacccacgatgagtgaggcagaagcccgcccgactaactttattcgtcagatcattgatgaagatctggctactggtaagcacaccaccgttcatacccgttttccaccggaaccgaacggctatctgcacattggccacgcgaagtctatttgcctgaactttggtatcgctcaggattaccagggccaatgcaacctgcgtttcgatgacaccaacccggtgaaggaagatatcgaatacgttgagtcgattaaaaacgacgtgcagtggttaggtttccactggtccggggatgtttgctactcgtctgattatttcgatcagctgcaccagtatgcggttgaactgatcaataaaggtctggcctacgttgacgaactgtcagcggaagagatccgtgagtaccgcggcacgctgaaagagccgggtaaaaatagcccgtaccgcgatcgcagcgtggaagagaacctggcgctgtttgaaaaaatgcgcagcggtggatttgccgaaggtaaagcctgcctgcgcgcgaaaatcgatatggcctctccgtttatcgtgatgcgcgatccggtgctgtaccgcattaagtttgccgaccatcaccagaccggaagcaagtggtgcatctacccgatgtacgactttacccactgcatcagcgatgcgctggaagggattacccactcgctgtgtactctcgagttccaggataaccgccgcctgtacgattgggtgctggataacatcagcatccccgtgcatccgcgccagtatgaattctcgcgcctcaacctcgaatacaccgtgatgtccaagcgtaagctgaatcagctggtgaccgagaagcacgttgagggctgggatgacccgcgtatgccgaccatttccggtctgcgccgtcgcggctataccgctgaatccatccgcgagttctgcaaacgcatcggcgtgaccaagcaggacaacaccatcgaaatcgcttcgctggaatcctgcatccgtgaagatctgaacgaaaacgccccgcgcgcgatggccgttatcgacccggttaagctggttatcgaaaactatccgcagggcggcagcgaaatcgtgaccatgccgaatcatccgaataaaccggagatgggcagccgcgaggtgccgttcagcggcgaaatctggatcgatcgcgccgacttccgcgaagaagcgaacaagcagtacaagcgtctggtgctgggcaaagaagttcgcctgcgtaacgcttacgtgatcaaagcggagcgcgtggagaaagatgcggaaggcaacatcaccactatcttctgcacctacgatgccgataccctgagcaaagatccagccgacggccgcaaggtgaagggcgtgattcactgggtgagcgcggcgcacgcgctgccggtagaaatccgcctgtacgatcgcctgttcagcgtaccgaacccgggcgcggcggaggacttcctctcggtgatgaacccggaatcgctggtgatcaaacagggttttgccgagccgagcctggcgcaggcgcagccggaaaaagcgtatcagttcgagcgcgaagggtatttctgcctggatagccgctatgcaaccgcaaccaatctggtgtttaaccgcaccgtcggtctgcgcgacacatgggcgaaagtcggcgcgtagctacccgccgttattgagaacgccgcttactgcggcgttttttttattcagaatcagagaattaaatcctcatattttcgcgatgcgaattaatcttgtttacagattgtaataaccgcttttattaactctttccatccattgcatataaatatgtaatcgctttcatttcccctaattttctctttttttgcaagcatttcacccgccaaacgtgtgacatctacgactgaaacaaaaagacataaattatgtgcgctttgtcataatcttcatctttggtcggcgaaagagattgataattcgcgtcacgaaaaatagtctatacccagtggttatgcgaatttttaccgcaccactttttaagcagtcttattttatttttttgcgtgttgcctttggtaaccgcacttttaaaacgtcaaagaggatatgcatatgcgtacgtttagtggcaaacgtagtacgctggcgctggctattgctggtgtcacagccctgtcaggatttgcaatggtgccggatgcaaaagcagaagggttcattgatgattcaacgttaaccggcggcatctattactggcagcgtgagcgcgaccgtaaagatgtgaccgacggcgataaatataaaactaacctgtcgcactccacctggaacgccaacctcgacttccagtccggctatgccgccgacatgttcggtattgacgttgctgcctttaccgccatcgaaatgggcgaaagcagcgagagcggtcacccgaacgaaatcgctttctcctcgcgtaataaaacctacgatgaagactattccggcgataagagcgggatcagcctgtataaagcagccgcaaaatttaaatttggcccgacctgggcgcgcgcgggctatattcaaccaaccggccagacgctgctggcgccgcactggagctttatgccgggtacctatcagggggctgaagccggtgcgaactttgactacggcgatgcgggcgcgctgagtttctcctatatgtggacgaacgaatataaagcgccgtggcacattgagatggatgagttctaccagaacgacaagaaaaccaaggtggattaccttcactctctcggcgccaaatatgattttaaaaacgaccttgtgctggaagcggcgtttggtcaggcacagggttacatcgaccagtattttgccaaggccagctataagtttgatgttgcaggcacgccgttaaccaccagctatcagttctacggcacccgcgataaggtcagcaacggcggggttaacgatatctatgacggcaccgcgtggctgcaggcattgacctttggctataaggttgccgacgttctggacctgcgtctggaaggaacctgggttaaagctgatggtcagcagggctacttcctgcagcgtatgacgccaacttacgcatcgtctaacgggcgactggatatctggtgggataaccgttcggacttcaacgccaacggtgaaaaagcggtgttcttcggcgcgatgtatgacatgaagaactggaacatgccgggctgggccttcggcgcctcctacgtttatgcctgggatgcgaagccggggagaatgtcctcgcctgatgcgtactacaacccggataaacgcctggaagagtccgcctatagcctggatgccatgtacaccgttcaggaaggacgcgctaagggcacgctgttcaaactccactttacgcaatacgacaaccactccgatatcccaagctggagcggcggttacggcaacatcttccaggatgagcgcgacgtgaagttcatggttatcgctccgttcaccattttctgatgccactgcggcgggggaaacccgccgcaatttcccgaggttcatgatgaaaaagttaatacttgtcgccattatggcagcaggtctggttgcctgtacccagtcgccagcgcctaaggaagactcaaagttaaaagatgcctacagcgcctgcattaataccgcagagggcaatccggataaagttgaagcctgtcagagcgtactgaacgtgctgaagcaggagaaacagcatcagcagttcgcgacccaggaaagcgtgcgggtgctggattatcagcagtgtatccaggcgcgcaaaaccgggaacgatcaggctgtagaggcgcgctgcgaccagatctggaaagagatccacagcaacaatacgccgcgttaagccagacggcggcaagcaaacgggcggagcgtcaactccgcccgttgctattttagcggggtatttctgccggctggtagccgcggcccaggcgtacgaagagcatcgcggtagcggccaggccgcatagcgcggcgcacatcagccaccagcccggcgagcttttatcgcccgttatctcgaccagcgcggtggaaatggccggcgtcaggccgccgaagatcgcggtggcgaggctaaaggccagtgaaaaacccacggtgcggacgtagaccggcatcacttccgtcagggcggccaccatcgcgccgttatacataccaaagaagaacgagaaccagagcaggaccagcgtcatgcgggtgaaatccggcgcggcggtgagccagtgcatgaccggccaggtagtgagcagcgccagcagggttatgcccatcagcaccggccgacggcctattctgtcagaaattgcgccgccaatcggtaaccagataaagttagagatgccgaccagcatggtcaccagcagactgtcgcgggcgctcagatgcagaacggctctaccgtaggtcggcgtatagacggtaataaaataaaaggtggtggtagtcatcgccaccagcaaggtccccgccgtgatgatgcgccagtttttggcaatcgtgctcaggatctcccgcgtgtcagggcgatgcttgcgctgcagaaaggcttcggtttcctgcaacgaacgccgcagcacaaaaatcagcggaataatcatacagccaataaagaagggaatacgccagccccattcggcaatctcatcgtggccgagcgtttcattcagcgcataaccaatcaacgccgcgaagacgatagccacctgctggctggcggattgccagctggtatagaacccttttttccccggcgtggcgatttccgacagatagaccgacacgccgccgagctcgacgcccgccgagaatccctgcagcaggcgacccactaataccagaacgggggcgagaatgccgatggtttgatagccgggaaccagcgctatcagcagcgtcccgcagcccataatcgccagcgtcaccatcagccctttacgccgtccgatcctgtcaatataggcccccagcactatcgcgccgatggggcgcatcagaaagcccgaaccaaacacggcgaaggtcagcattaacgccgcaaactcgctctccgccggaaagaacgttctggcgatataggtggcgtaaaagccaaacagaaaaaagtcgaattgttcgagaaaattaccgctggtcacgcggagaatggcgccaaaggtaccggcgcgcgatgagggttgcgtcataggggttgctctccattgtctttatcttgtttttatagaggtaagatgagcggactagtcgcctgcgactgccgcctgttttccgcgccgtttctcaatcgcccacttgagtaacgccgcacagcgataaaatccgtgggcgaattttccgtatggcagggtcaaaaacagcgccatgaccacgccgaggtgaatggcaagcagaatgcccatccacgaggtgtctcgtcccgccagcagggcgaggccggtgaagctggtcagcagcagcagcagaataaagccgcgatccatcggtttttgccgcgggtcgccgtgcagcggcgagcggcgcaggttcagccatagcaaacccgccgggcccaccagcaggccgatgccgccgagcgtgcccagcacaaccggtacgctgaagaacgggtagggggcctcccagccggcgatatagtgataacccgtggctaccactgtggcggcgaaacagagcagaaacccgtagaaggtaaagtgatggaaacggcggcgcagcagggtaaacgcgtcatcggcctcgttgcagcccttaccgtgcccgccgtcgagatacttcagcgtgagcgcattatgcgaggcttcagcgatgtcgatggcctgaggctgacccggcgagatctcgcgccagaagcggatcaccccggccatcagtaaccccatggccagtatgaagaccgtgccaaacatccacgccagcaggttatggggaaaaatctggtagaaatcgccggccagcggtggatgaagcagggagcctttgagccccatcgccagcagcagaaagaggatcagcccgccgaccagcgccagtaccgtggttacgccggcccgacgatacaggctgccgaaagccgcgggctgagcatagtgttgataggtctccaggcgcacttccgccatcgccttcgggacattaatggcaaactcgtgcggaggcgcgtactggcaggcatgcaggcaggcgccgcagttatggcacaggttggccaggtagtttatatccgctttgccaaaagccaggcgctgggtcatggccggaaacacggcgcaaaacccttcgcaatagcgacaggcattacagacctgcatcacccgttcaacttccgcttccgactcggtgatgatttgcgcgtcaatgatcagcatttcaagcgatttcatggtgtgtctcctgctgtgccgcgcgggcggcctgctggccggcaatacggccgaacgtcgtaccgatggacatgcccacgccggcggtataccccttgcccagcacgttgccggccatcatttcgccggcgacgaacaggttgcggctcggcttgcccgcaaaatggacggcggcgcgttcattaacgtacagcccaaggtaggtaaaggtgatccccggccgtagggcatagccgtagtagggcggggtatcgatgggccgcgcccagtgggttttcggcggcgtcaggccggatgtcgcgcagttatcaaggcgggtatgatcgaactggcccggcgtacaggcggcattgtagcgggcgatggtttgcgccaggcgttccgcgtccagccccagctggcgagccagctcttcaatggtattggcctgggcgccggggaaaacgggcggcataaagtggccgatcgctttgctgtcgatgatcgagtagccgatttgccccggctggtgggcgaccagcctgccccagatggcatagcgtttgggccagaaatcttccccttcatcataaaagcgcccggcgtcgcggttgacgaccacccccagcgatacgcagtccacgcgcgtgcagatgccgccatcgtagagcggcgcccgggcgtcaatggcgacgcagtgggattgcgaaggatcgccgatgatgtcagccccggcgtcaatcataaacttgagcagcacgccctgattgaaacgagtgccgcgaatgagaaaattatcggctggccattcaccgcgctcgttctgtccccatgcttcacgcagccactcgcggttagattcaaatccgccggcggcgaggacgcaggttttggcgacgatcctctcttcgcccgccagcgcggcgacgaattcgccgttatctaattcgagcgcctgtaccggcgtgttgtagcggatctttacgcccatctgctccgcgctgcggtaataggcatttataagagccttgccgccgcccataaaaaaggcgttggtgcgggccacgtgcagggcgccggagagcggcggctgaaagttaaccccgtgctggcgcatccagtcccggcactgcgatgaggtgcggatcaccaggcgcgccagcgcttcgttggtgttgccctcggtgacgcgcagcaggtcctgccagtactcttcttccggatagctgtcgaccaaaacatcctgcggagcatcgtgcatacagcgaagattccgcgtgtgctgagagttgccgcctcgccattcccgcggcgcggcctccagcagcagtacggacgcgccagcttcccgggcggttaaggcggcgcatagcgcggcattgccgccgccaatgaccagtacatccaccatttatggctccattacgctttgcttgattgttaaaattgtaatggaaatgtatgcgttacggccggctggacgctatggcgtattgctaaaggggggtttagtttgcgtaaaggctggcgccgggccagcgacctgactcaaccagctgacgcatgactttcgccagtattacgcgggccgcaaggcctgccggagtcagttcatcatcggaaaggctgacgagaaaattaggtcgactaagtatcggattgtcgacgccgatcactctcagggactcgctgtcgagatgggaaattgccgcccccggctgcaaagtggcgccgagcccgtcgcggacggcgcgcatcagcagggccaggccgtcgatttcagccaccacatcgacgctcagggcatgctcctggcagatcgcttccagcctgccgcgcagtccatgccccaggcttggcataatcagcgggatagcggccagctggccaggcgagatactcgcttcgggaaggggggacaggacgtcataggtgccaatcagaaacagacgctcttcaaggatgggcctggcgctccagcgcacaagcttctccttctggaacacgatagctaagtcaagctggcgggtgttgatcatgcgttccaggttaccggagaggctctcgaccaaatgcaggcggacgtcggcatagttttcgcgcatcgcgtgaataaaaggcaccccgagaacggaggcggtgctgggggccataccgacgctgacgtggccggaaaggcgcgcctcgcgcgcggcgagaaccgcatcatcggcgtgacgcagcgcgagctgcgcctgggagtagaaggcgaggccggcgctggtcggcatgacgccgcgagacgtccgctgcagcaggcgaatggcgagttcgttctccaggcgcgccatctgttggctaagcgcggagacgccgatatccaggtcaagcgcggcgcggcccatactgccggtttcaataatgcgcacaaaatagcgtagctggcgaagctccatgtcgactctccgtacacgtcaggatgcactgacagtaaacgtattgcagcgcgagagaaagaggcggcagattccgggcaaaaaaaagccaaccttcaggctggcttttggcggtacacgatgcggtgattatttctctgccgcgtcgtgggcatgttcatcttcgcggcagtcgccttctgcgcagtggccgtacaggtacaggctgtggttagtcaggcgaataccgtgccttgcggcaatttcacgctggcgcgcttcaatggaatcatcgctaaattcgatcactttgccgcagtcgaggcaaatcaggtgatcgtgatgatgctgctgcgtcagttcaaaaacggatttaccgccttcgaaattatgacgggtgacgatgccggcgtcgtcgaactggttcagtacgcggtagacggtggccaggccaatctcttcacccatatcaatcaggcgtttgtataagtcttccgcactgacatgatggttatccggtccttgcagcacttccaggatttttaatctcggaagcgtcactttcaggccagctttctttaatgcggtattgttgtcagtcatgcggaatctgtcctgttgctaaacgatctacttccttcagcggaagtaatacagagaatcacccgatgtaatgcgtctcattatagaactgccatggtgaaatgaaaactgcaagcatcgggccttgtatgctgtcaaaaacgaggcactcgctacaaagtgcttcacgcgaccccgttaaatcagaggacattgtacagatatgtgattaaaagttaaaaacttgtagctataactttgattgcttttatctattaattcggcgaaacctgatgattacgccgttcagactcaggcattcttgatttcttcgaggtgcagctcttcagaaatctgttttacccatttttccacgcgttcgttagtcagctcaggctgacggtcttcgtcaatggccaggccaacaaagtgatcgtcatcggccaggcctttagaggcttcaaaatggtagccggcggtcggccaatggccaacgatagttgcgccgcgcggttcgatgatatcgcgaatggtccccagcgcatcacagaagtattcagcatagtcttcctgatcgccacagccaaacagagccaccagtttgccattgaaatcgatctcttccagcgtcgggaagaaatcgtcccagtcgcactgggcttcgccgtagtaccaggtgggaatgccgagcagcaggatatcgtgagcttccagatcctctttgctgcttttggcaatgtcgtgaacatcagcaacgtctttaccaagctgcttttggatcatttttgcaatattttcggtgttgccggtgtcgctgccaaaaaagatgccgatgattgccatgagtaaaataacctcttgaaacttaatgatgtggtagtggcgtaatgcccgcagataggggcaatgatagcagaactgagaagggcgcggaaacagcaatcacgcccaactgcacactctgctacacgaaagcttattttttgagggttttaggctttatcctggccgcgcagggctgccagctggttcatcagcatctcttcgatgagatcgctgcggttcatgttacgggcttcggccagctcattaagcgcatcgacagcatcggcattgagctttagctccacgcgcttcagaccgcgactcttatcgcgtttaagctgattgcgtttgttgatgcgcagctgttcatcgcgcgaaagcggattcgttttcggtctacccggccgacgctcagttgcgaacaaatctaatgtcgtacggtccgtttgttcttttgccatgattcagagtgacttcgggggaaacaagctatcgggcatagccgacgcagacagcgcgccataatacatcaggcgacgggctgcgccaacggccgcgggcattaagccgcgcggtcgagtatattttaggcagttacgcggcgatagaggtcaaataacgacggatcgcgcggataacggcctccggtttttctgcatgcacccagtgcccggcgccggcgataacgtgcgcgcgcgcctggggaaactgagctaataaagtctcgcggtaggcatcggtgacgtagggggagttgccgcccggaataaacagcgccggatgcggccagggcggaacggtttgccagccgacgatattatcgtactgctcccacagcaccggtacgttaaaccgccactggccgtccacgaaagattttaacagaaactgaatcacgccctcttcgttaaggcgctggcgcatgaccgtcgccgcctgctgacgcgtagcggcccccgcgtcggtgacggcattgatggcggcgaagatttcatcatggcggcggacgtgataatccaccggggcgatatcaatggcgaccaggcccgcgatacgctccggggccagcgcgctcagcgccatcaccgctttaccgcccattgagtgaccaataaaggtggctttctcaatctgtgattcattgagaatatcaagcagatcctgggccatcgcgggataggtcatgtcaggcgagcgcggcgaaaggccgtggtttcgcatgtcgacctggataatatcgcgatcgagaaccagatcgcgggcgaggatcccaagattatccaggctgccaaaaaggccgtggaccaggacgatagggggattattgtgcggattctgtgcagattgcgctcggctatttaatttcatggcaaagttctttttttcgctccgtcgggttagggtattatgttggacattctgccatccggctgcaagacccggaagatatccgagttttaccgccatcctggtttgacgctatccgcggttgggatttgtccctataatcccgacaacttgtattcagaaaaagatatcgcactggattaagatgaaaacaattgaagttgatgatgaactctatagctatattgccagccacaccaagcatattggcgagagcgcatccgacattttacggcgcatgttgaagttttccgccgtttcccagcctgtcgcaccggtagcgaaagccgctacggcccctgcgccaacgcctgtcgttgaagtgaaacccgccaatcctctgaaagataaagttcgcgctatgcgtgagctgctgttatctgatgagtacgccgaacaaaagcgcgcggtaaaccgtttcatgctggttctgacgaccctctacgccatagacagcaaagcgtttgccgaggcgaccgagtccctgcacgggcgcactcgcgtttatttcgctgaggatgaacgcacgctgcagaaaaacggtaatcagacgaaacctaagcaggtaccggggacgccgtggtgggtcattacaaataccaataccggtcgcaaatgcagcatgatcgaacatatcatgcagtcaatgcagttccctgcggaattgatcgaaaaggtttgcggtacgatctagttagttaactttgcaccagaaggatcaggcaatggcaatcgataagcgcgcgggtcaacctgcgcaacagagtgatttgattaacgtcgcccaactgactgcccagtactatgtgctgaagccggaagttggcaacgcggaacatgcagtgaagtttggcacctccggtcaccgcggcagcgcggcgcgccacaacttcaacgagcagcatattctggcgattgctcaggcaattgctgaagatcgcgcgaagaacgggatcaccggcccatgctatgttggtaaggacactcacgcactctccgaaccggctttcatttccgtactggaagtgctggcggcgaacggcgttgacgtcatcgttcaggaaaacaacggcttcaccccgacgccggcgatttccaatgcgattctggtgcacaacaagaagggcggcccgctggctgacggtattgttatcacgccgtcccacaacccgccggaagacggtggtatcaagtacaacccgcctaacggcggcccggcggataccaacgtgactaaggtggtagagaatcgcgccaacgaactgctggctgccggtctgcagggggtgaagcgtatttctcttgatgcggcgctggcctccggccacgtcacagagcaggatctggtgcagccgtttattgaagggctggcggatatcgtcgatatggcggcgatccagaaagccggactgacgctgggcgtcgatccgctgggcggttccggtatcgaatactggaagcgtatcgctgagcattacaatctcaacctgaccatcgttaacgaccacgtcgatcagaccttccgctttatgcacctcgataaagacggcgcaatccgcatggactgctcctccgagtgcgcgatggcgggcctgctggcgctgcgcgacaagtttgacctggccttcgccaatgacccggattacgatcgtcacggtatcgtcacgccggccgggttaatgaacccgaaccactacctggcggtggcgattaactacctgttccagcatcgcccgcagtggggcaaagatgtggctgtcggtaaaaccctggtctcctcggcgatgattgaccgcgtagtcaacgatctggggcgcaaactggtggaagtgccggttggctttaagtggttcgttgacggcctgttcgacggcagcttcggcttcggcggcgaagagagcgcgggggcgtcgttcctgcgctttgacggcacgccgtggtctaccgacaaagacggcatcatcatgtgcctgctggcggcggaaatcaccgcagtcactggcaaaaacccgcagcagcactacgacgagctggcagagcgcttcggcgcgccaagctacaaccgtctgcaggcttccgcgacgtctgcccagaaagcggcgctgtctaagctctctccggaaatggtgagcgccagcaccctggcaggcgatccgattaccgcgcgtctgaccgcggcgccgggcaacggggcggcgattggcggtctgaaggtgatgaccgacaacggctggttcgccgcgcgtccgtcaggtaccgaagatgcctataaaatctactgcgaaagcttcctcggcgctgaacatcgtcagcagattgagaaagaagcggtagagattgtcagcgaagtgttgaaaaacgcctaattgaccgcacgataaacaggcccttttcagggcctgttttttttcgcagggatagcgatgaatctggaacgaaaaaacgttttttggttttggggtgggatggatctcttttatctcttgcagtttattggctggaacatctaccaccggcgagtaccgctttacgacgatatcctctcatttttaccgctgctgcaaacctggggctccgcggccgcctggctgtttacccttcattttattctgactatcagcattcccgcgtcgatggttctcttctggcgccagagccgctatgcgccgtggctggcctatgcgcagacgccgctgcgtctggcctttatgctcccgtcgctttcgctggtggcctggctggcgcaggcggtggcgttgaaaagcgcggccttctttattgctctgctgctggtctcagaggcggcaaaagtcgtgacattatggcgatgctgcaaggtttaacgttatgtgttatccagacggcacaggcctggcgggtattacgctgactgaatcgggcataaacgggtattattgctttgaccgggtttgcccgttttagcgaatatacggctaaagcaaacgaacaatcacggctaattctgcgattttaatcacaaatttattccatccaaaatgaaagttgcctgatatatatgatcaacttcaaactaaaaaaagctaaaaacttgttttgattttgtatgatttatgtcacttactgatatggacgattttgttatatttatgtcattaaatcctgaatgctttcttgagaacgtctatgttacaagttaaacgtcattcattaattgtggaatatgtcgtagaaaaaggatgcgccagagttaatgagctctcacagatattcggtgtatctccagaaaccattcgccgggatttaaccgcgctggcgagaaataaaaaaatagttcgtagctttggcggtgcaatgatttctgaaaataatgcatcatttttagctgccgatacgccgacaaatcacgggaactttgtcgataaagccgaggcctttattaagcgcaccaaagagcagccggaacgtaagatgcgtattgctaaaggcgcgctgcagtttattcatgagcatgagtgcattatcatggataatagcagctcctgctggtttttagcgcgccagctgcctgacatcgagctgaccgtgattaccaattctttgaatattattcaaaccttagcctgtcgtaagaaaataagaatagtcagcgttgggggtgaatattctgagcgccacggtgattttcacggtccggtcgccgagttcattatcaacaactttaaggtcaataagctgtttttttcttgccagggtctcgacgccgggctggaaataaaagacagcaatgaagtcaacgtccggctgaagcaggagatgctgaaagttgccgatcaaaaaatcctgatggtcgatagcagtaagtttgaacgttattcactctataaaatatgcgatctggcggatattgatgtgttgatcactaacgaattaccagctgatacctatcgccagcaccaggtacatattgtcgagactaaatagccgctctgccagatattctaccggcattattattgaatagcccttgtgcccgatggaggggtattgcgccagcaataccatccctcttcattatttatccgaaaaagaggtttacgatggaacaattacctgaagatatgaaagcggttgtctgccatggtccccaggattatcgctttgagaaaattccccgcccggtcgccaaagaaaaggaagtggtcattaaggttgacgggtgtggaatctgcgccggcgactgcaaggcccaggacggcgcgccgatgttctggggcgataatccgtgggtgaaaacgccggtggtgcccggccatgagttttacggtcgggttgccgaattaggcccgggctccgctgaaaaatatcaattaaaaattggcgatcgcatcctggctgaacagattgtcccctgccatgagtgccgtttctgtaaaaccggcaaatactggatgtgcgaaacccatgatatttacggtttccagaaggaggtcgccgatggcggtatggctgaatatatgcgtttttccgaacgggcaattattcacaaaattcctgaatcattaagtgaagaagatgccgcgctgatcgaacctatggcctgcgcaatccacacggtacgccgcggtgatatcgaactggatgatgtggttgttatcgccggcgccgggccgctggggctgtgtatggtgcaggtcgctcatctgaaaacgccgaagaaactggttgtcatcgacacgatggacgaccgcctggcgctggcgaaagcgtttggcgccgacgtggtcatcaatgcggcgcaagaggacgccatcgctatcgtaaaatccatgaccgatggctacggctgcgatgtgtatatcgaagcgacgggcgcccctatcggcgtgacccagggtctggagatgattcgtaagctgggacgcttcgttgagttcagcgtgtttggtaaagaaacgaccgccgactggtcgattattggcgaccgtaaagagctggatatccgcggcgcgcatctggggccttacagctatgaaatcgccatcgatctctttgcgcgcggtctgctgaccgccaaaggcgtggtgacgcatttctattctattgatgagtggaaagccgcttttgagatggctaaatcgctcgattcgattaaggtcgtcattaagccataaattttttaactagttaagttcgccatttttaattattacgcaaatgaccgctgatggctgttcattaaatactggatttcaatcatggggataactgagaacaatatcggtggcttctggctatctgccagcggcgtatttattgctcagtatatcaggcagcatccgcaccatgaaaacgctgataaataaattttatttctcagcgcattactcaataaggagatagtgaatgcctgtaaaatttaagactaaagcaatactctcaggacttcttgcgatgagcatggttgcctgcgttaatgccaaacctttgactatcggtatgtcgttccaggaattgaataacgaatatttcgtcaccatgaaagagtcgcttgagcagtcggcaaaagatattaacgccaccgtctataccgcggatgcggcgcatgatgtctccaagcagattagcgacgttgaggatatgctgcaaaagaaaatagatattttgctgattaacccggctgatagcgtcggtgcggaaaccgccgtgctggccgctaaaaaagccggcgtggtggtggtggcgatagatgctcaggctaatggcccgatagattcttttgtcggctcaaaaaactatgatgcgggctttattgccggggaacacttagccaaagcgctgggtgataaaggcaacgtagcgattctcgacgggattccggtggtacctattctggagcgcgtgcgcggctttgaagatgcgatgaaaaagcatcctaatattaaagtgattaccaaactgaatggtaaacaagagcgcgatacctccatgagcgtgacggaaaatatgctgcagtccaacccgacgctcaacggtatttttagcgtgaatgatgttggctcactcggcgctctggcggcgattcaggcatcagggcgcgatgtgaagctggtgagcgttgatggttctccggaagcggtcgctgaaattgctaaaggtaatacgccgtttattgccaccgccgctcagttcccgcgcgatcagctgcgtattggtttaggtattgccctggccaaacattggggggcgaatattcctaaagagatccctgttgatgtgaagcttatcgataaaaccaacgccaaagatttccactggtaatcgcattattacgccatagcggctctcgcttattcaggtgagccgtgccggattcttcttaaagtatggctcgctattttatcgagccattatggagcgatgtttatgcccagcttactggaagtcaaaaacgtcagtaaaagcttccccggggtcaaggcgctggataatgtcaatatcacccttggccgaggggaggtgcatgctttattaggtgaaaacggcgcgggtaaatcgacgttaatgaaaatcctttgcgggatatatcaacctgacgccggtaatatttttattgacggtaagcagcagcattttcataactatcgtgacgcgattgcctgcggcgtagggattatctttcaggagttttctcttattccctatctgaacgcttatgagaatattttccttaatcgcgaaaaggtaaatcgttttggcctgctagatcgtaaagcgatgcgccgcgaggcgttacgcatttttaaagatcttggcgtgaccctcgatcccgatgagcaaatttgccatctcagcgtcgccgaacagcagttcgtggaaattgccaaagcgctgtcgctggatgcgcgaattctcattctggatgaacccaccgcgaccttaaccccgagcgaggcggagcatcttttccgcgtgatgcgcgatttaaaggccaaaggcgtcgggatgttctttatctcacaccaccttgaggagatatatgagatctgcgacagcctgagcattctccgcgacggcaaatatatcgggtcggcaaaggtcgacaatatcgatatcgccgagatgatccagatgatggtcggccgtgaggtggagaatatctatcccgagcggcggacgctggcgcatgatgagatactgctggaggccgaaattcagcttaccgagagtagccagctcaatcgactgacgctgcgcaaaggggagatcctgggcctcgccgggctggtggggtcggggcgttccgaagcgatcctggccctgaccggcgcggataaatgcttcaaaaagcgcgtccgcctggccggaaaagaggtgacgataaaatccaccgaccgggctctgcgtctgggcattggtctgttgccggaaagccgcaaaacgcagggactggtgctgcctttttcggtcaaagataatatctggcttaacaaacacgcctgccagttctcgcttatccgcgataacgaagagcgcctgaccgccgagcgtttaattaatcacgttggcgtgaaaacgccggatgccgggaccgcggtgggcacgttgagcgacggtaaccagcagaaagtcgttatttcccgttggttaaatcatgatgtcaatattcttatttttgacgaaccgactcgcggtattgatgtcggagcgaaatcagaaatctatcagattatgcgcgacctcaccgcccagggtatttcaataattatgatttcatctgagctaccagaggtgattggcgttagcgaccgggtaatggtttttcgcgacggtaatatcgttgccgaactcgagaacgaccaaatcaattccactgtgattatgctgcacgctgccggtaatattatttagggagtattaaatgagtaatgaaaacgtgtcattagcgcccgccgcatctcctgataaaaataaaaagatgctccatggtttattaaaaatgcccgcgttcctgccgtttgttggtctggtactcctgttctcctgtatggctatttttaatgactactttttaacggtcgataacttatcgaccgtcgctcgtcaggtctcgattaatgccatcattgccatcgggatgacctttgccattctgaccggcggaatcgacctctccgtcggcgcggtcatggccctggccggtaccctgatggcgggattaatgaagtactatggtttagatccgtggttagccattcttatcggtctgtgctccggcgtcgcctttggcgcgctgaacggctttttaaccgcctacggtaaaatgccgccgattatcgtgaccctcggggcaatgattattgcgaaggggctggcgctgatctataccggcggctaccccatctccggcttaccggattcattcgctttttggggccgtgaatatctgttcggtattcaggtgcctattattctgatggtggttttatatctcatcttttatatcgtcctgaatcatatgccgtttggtcgctatgtttattccctcggcggtaatgaagaagcggcgcgcctgagcggcctgcgggtgaaatattataaattgctggtttacgtgatcagcggttttaccgccagttttgccggccttattttcacctcgcgggtgatgagcggccagccgaatgccggcgtcggatttgaactggatgccattgccgccgtggtgctcggcggggcatcgattgccggcggccgcggaatgattatcggcaccctgattggcgccatgatgctcggcgtactgaataatggtttaaaccttctggggatctctccttacgttcagtacgtggtgaaagggcttattatttggggcgccacctttattagctcagccagacgttaacttattttaaatatgaggcgaagggatatgaattttatcggggttgatatcggtggtacggtcaccaaagccggtatatataatgagttagggcaagagattcacgtggcgtcgcaatatgcgcaggtattatccgaacagccgggctttaccgagcggaacatgcatgagctatgggacactgtttgcagcgtgataaaaaaagcgctgtatgaaagccaggtgccgccgctaagcatcggcgggatcggtttctcctcgcacggcaaagggctctacgcgattgataaaaaaggcgagccggtgcgcaacgggattatctcatccgatacccgggcgctggcgtttgtcaaaaaatggtatcgcgaaggtatagacaagctggcatacccaaaaggattgcagcagctgtggaccggacatccggtgtcgctactggcgtggctgaaagcgcatgaaccggccaattacgacaggatcgacgccgttttaatggtgcacgactacgtacgtttccgcctaaccggcgaggcgacggcggagatcactaatatttccggcagcaatttttataaccagtttacctcccgctatgaccgcgacatgatggcgctgtttggcattgaggaagtggcggataaaaccgcgccggtggtgaactcgacggactgcgtgggccacattaccctgcaggcctcgctggattgcggtttgtgcccggggacgccggttttcggcggctttttcgacgtggtggcctccgccgtctcctcggggattgaccgggcggataccctgagcgcggtggccggcacctggagtatcgccacctcggtgacggatagcattattgccagcgactttccctacatctgggggaaatactgcattccgggtaaatacttcgttcacgagggcagccccacttcggcgagcaatctctcctggtttgtgaagcagtttttccctgacgatgaccgctgctacgaccatttcgaaagctggattgcgcaagataccgacagcaacctcatttttttaccctatttgttcggttccaatctggcgatggatctgcccggcgcgctggtgggcctcgcggggcatcatacgaaaaaggatattattgcggccatctatcgcggcatcgttttttctcacctggtgcatcaggaccgcattattgaactcaatcgggatattcaaaaaattcgctttaccggcgggccgagccagtcgagaggctggacgcagatgtacgccgatgcggccaatcttccgctggaagtggtggatatcgaacaggccggctgtcgagccgccgcgctgtgcgccgcggccggtagcggcgcctacgctaacttcagcgaagcgattgccgccacgcagcccgaggtggtctgctatcaacccgacagcaatcggcatcagcagctgcgtgaaggctacgcccgttacttagcggtcgcgcaaagcctctccagggcgacgggagcggcgcaatgaaacccagacttggcatctacgaaaaagcgctccccgcggcgctggactggccgaaacgctttgaaatggcggcgggcctggcgtttgattttattgaaatctccgttgacgaaagccccgagcgccaggccaggctgcgctggaaccgggggcagcggctggcgttcgtggccgacaaaattaacagcggcattgatgtgccgagcatgtgcctctccgcgcaccgcagccatccctttggtagcgtcaatcgcgatacccggctcaaggcgcgggaactgatgcttgatgcgctggattttgccagccacgtcggcattcgcaacatccagctggcaggctatgacgtctattacgaatcctcttcggcgcagacccgggaatactttatcgagggcatcaactgggcggtggccgaagcggcgaaagcgcaggtgatgctgtcaatggagattatggataccgcctttatgagcaatatctcccgctggctggatctcgaacggaaggtttgcagcccgtggttttgcgtctacccggacgttggcaacttaagcgcctggcaaaacgacgttcctgaagagttgagaaaaggcattcataaaatcaccgccattcatttgaaggatacccagccggtttcccacgcttcgctggggcagtttcgcgatgtgccattcgggaccggctgcgtcgattttatcgagatatttcgtacgctctcggcgcttaactatcgcggcgcctggctgattgagatgtgggccaaaaatgacgggctggacagcgagagaatcgccgacgctaaagcgtggctaacggataaataccagcaggcgtttcgcccgcctcagtatgaaggcattgtgaattcaggagtgaagtatgttggataacctcaagcaggcggttcttgacgccaatctggcgctgccgaaatttcatcttgtgacctttacctggggcaacgtcagcggcatcgatcgcgacgccggactggtggtgatcaaaccctccggcgtggaatacgccgtgatgacggccgaggatatggtggtggtggagctggcgaccggcagggtggtggaggggcgctataagccctcgtcggatacgcctacccatctggagctgtataaggcgtttagcggcgtgggcggaattgtgcatacccattcgcgccacgcgacgatttgggcgcagtcgggcaggccgctgctggcgatgggcaccacccacgccgactatttttatgggccgatcccctgtacccgcccgctcagcgatgatgaaatccgcggtgattatgaaaccaataccggtcacgtgattattgaaacgctgggcgcgcagcataccgatccgctcagcgtgcccgccgcgctggtccacggccacggcccgtttgcatggggaaaagatccggcgaacgcggtgcataatgcggtggtgctggaggagattgcctatatgaatatgtggacccgtcagctgagcattgacgaacagccggtctctgcgacgctactggataaacactatttgcgtaaacacggggcaggggcctactacggacaataatcgcctgccttccccggattgcggcgtaaacgccttatccgggctaccggcccgcagtcgacggtgaacccgtagcccggccagcgtagcgccaccgggatgaaacagcgttgatttatgaggcctggcacatttcccggaggcggcgcttgacgcgcctgtccgggctaccgcctggcagacgacggcggacccgtagcccggctaagcgaagcgcgagccggggacaacggctagggcataaaccgatagccgatccccgtttcggtcagcaaatgctgcggacgcgccggatcggcctccagcttttgccgcaggtgccccatataaatgcgcagatagtggctgtgctccaccgcattcggcccccagacctgattgagcagctgtcgctgggtcagcaccttgccgggattattgagcagtaccgccagcaggcgaaattcaatcggcgtcaggtggatctcctgctcgccgcgtacgatgcggcgggcggggatatcaacatcaatatcggcaaaacgcacctgcggttcgtcggcctgggcgccggcatggcggcgcatcgccaccctcagccgcgcctgcagctcgccaataccaaagggtttactgagatagtcatcggcaccagcgtcaagcgcggcgattttgtcctgctcctcggtgcgcgccgatagcacgataatcggcatctggctccactggcgaacctcgcgaataaacgcgttgccgtcaccatcgggtagtccaagatcgagaatggttaaatccggcttgcgggtcgcggcttcgatcagcccgcgctgcagggtctccgcttcaaatacgcgcatgccgtcggcttccagcgcggtgcgcagaaagcggcggatagcattttcgtcttcaacgatcagaacgttaatcacatttcctcggctaactcttccagttcagggggcgtttccctcggcagtgtaacacggaagcaggcgccgccctgcgggcgcgtcgcggcgctaatggtcccgccgtgcacctcaacgatcgcctggcaaatggccagccccagcccgacgccggggatcgccgactctttattgccgcgagcgaatttatcaaagatagcctgttcttgcccggtggggatacccggtccgttatcccatacctcaagcactaaagtgtgcggatcgacgtccgcggtaatgccgatttgcgcctgtgctcccgcgtatttcaccgcattttccagaagattaatcagtacccgctcaaaaagcggaccgtcgacgtgaaccagcagtagcgggtccggcagcgcaagctgaatatgccgcccgccgagccccggctccagcatacgcagcgcgctgccgacgacctcttccagggttagccactctttatgcaaattaaagccgccggactggatccgcgccatatccagcagattattcaccaggcgggtggtattgagcacgtgctggcgtatctcgttggcctgcggggcgtgcttcgatccttcgctggcgagatcgagcgtcaggatctccgcctggccaaatagcaccgtaagcggagtccgtagatcgtgggacagcgccgccagcagcgagttgcgcaggctttcccgttcgctgttcagccgggcctgctcttcgctggcggtgagcgccagccgttccagagcgctggcgaccagcagggtgaaggtttccagcaggcgctgctgttcggggatcatcagctggcgcaggttggccggctccacgaccagcagtccccaggtgcgggcggcgcttttcagcggcaggatctggtagggcactccgggaagcgtatcggtgcccgcaccggcgggttgtcctttatcaaagctccagcgggcaatcgcgtcatcccaggtgattgccgccgcgggctttgtcagcggcgtgagtcttaatgtttcatcgggcagcagcagctggctgcgcgcctgaaacgttgaggcgataaaccgctcgctggtggcggcgatatcttcacgactgcggcccaccgccagcgcttttgacatttcgtacagatgccgggtgcgctgttcacgatagcgcgccacccgcgcctggtagcgtacgccggcggtgaggttgccgataagcagcccgacggtcaacatcacgccaaaggtcagcagatactgcacgtcagaaaccgccagcgtgccgcgcggcgcgacaaaaaacaggtcgaagctgaccacgttaatcaccgtcgccagtaccgacggccagcggccgtacagaagggcgataatcaccacgccgagcaggtacagcatcaccaggttggcggcctcaaaggccatcagccactgcatggcgacgacggtaataaccgcgcacagggcgatggcgacgacgcacccctggagctgtaaacgccatttttccatcgccgtccggctatcgctggcgcgcgccggcagggaggcggccttttcatccagcgcgatcaccaccaggtcgagatccggcgcgtgacgggccaggcgatcggcgaagccgctgcgatcccaccagcgccttttctgctggcggccaatcactatcttgccgagattatgttcgcgggcgtagtggaggacggccttctcttccgaaggatcggcgagggtggcggtttccgcgcccagctcctgcgccagcctgagcgcggcgagaatcgcccgccgtttcgcctccggcaggcggtgcagagagggggtttcaacatacaccgcatgccagacgctccccagccgggccgccagccgggcggcggcgcggaccagcttttcgctgccggtgttatggccgatgcacagcaaaatggcgtcgcgggtatgccagactttttcctggccctgacggtcgcgccaggcgcgcatctgctcatcgacccgatcggcggtacggcgcagcgccagctcgcgcagggcgatgaggttgcccttgcgaaagaagttctcgatggcccgctcggcctggccgccgatatagacttttccctcattgagccgctgacgcagatcgtcggggggcaggtccaccagtaccacatcgtcggcggcgtcgaaaaacggatccgggacggtttcgcgaacctgcacgccggtgatgccgctgacgacatcgttcaggctctcgaggtgctggacgttaacggtggtaaatacgtcaatgccggcttccagcagctcttcgacgtcctgccagcgtttaggatgacgcgagccgggcgcgttgctgtgcgccagctcatcgaccagaatcagcgccgggcgacgggccagcgcgccgtcaaggtcaaactcctttacgtagcgcccgcggagggaaaggcggcgctggggcagggtactgagcccctcaagcattgccgccgtctctttgcgtccgtgggtttccgccacgccaatcagaatatccagcccctgggcgcgcagccgctgcgcttccgccagcatcgcccaggttttaccgaccccggcgcaggcgccaaaaaatatctttagcctaccgcgatgcggggcggcggcgtgttgcagcaggcggtcagggtccggacgcagcggctcgtcactcatttttacttatccttcagggcatccagcgacatattcagctgcagtatatttaccacaggttggccgagaaaactgagcaacggtttttgcgttgcctcgttcacaagctgcgtgacctgctccacgctaagctggcgcgctttggcgacgcgcggcgcctgccacagagcggcggcaggcgtcagactgtaatccagtccgctcgccgaggcggtcaccagctccaccggagccgttgcgctggcgtccggattggcggcgcgcagggcctgcacccgttcgctgatggctttgtccagcgccggattgctggcggcgaggttgctgccgccggacgccagcgggttatccggcatctccgccgtcgcggaagggcggccctggaaatagcccggcgcggtaaagttctgcccgataaggcgggaaccgcgcacttcgccgtcaatccgcaccagcgagccgttggcctgctgcgggaaccaccactgtcccagcgcggtggttaacagcggatagacgccgccggtgagcagcgttaacagaataaacagcacaacagcaggacgaatgaatgacatggttttttcctcacagcagcccggtcagggtcaataacaggtcgatcgctttgataccgataaagggcaccagcagtccgcccaggccgtagacccacaggttgcggcgcagcatcgccgaggccgtcagcggcttatagctcacgcccttcagcgctagcgggatcaggaagatgataatcagcgcattaaaaatcaccgcgctcaggatcgccgaagaaggcgagtgcagatgcatcacgttaagcatcgccagcggcggatagacggcggcaaaggcggccggaatgatggcaaagtacttcgccacgtcgttggcgatactgaaagtggttaacgaaccgcgggtcatcagcatctgtttaccgatatgtacgacctcgatcagtttggtggggttagagtcgagatccaccatattgcccgcctctttcgccgcctgggtaccggagttcatcgcgaccgccacgtcggcctgcgccagcgccggggcgtcgttggtgccgtcgccggtcatcgccaccagccgtccttccgcttgatactggcggatcaacgccagcttggcctccggcgtcgcttcggcgagaaagtcgtccacgcccgcttccgcggcgatagcggcggcggtcaggcggttatcgccggtgatcatcaccgtcttaatccccattttacgcagctgggcaaaacgctctttgatgccgcctttgacgatatctttcagcgagataatccccaacacgcgttcgccttcggcgaccacaagcggcgtggcgccaagacgcgccacgtcttcaacctgtttatcgacgtcggccgggaagtggccgccgttggcctcaacgtggcggcgaatggcatccacggaacctttgcggatcatccgctggtcgatgttgatgccgctcatccgggtctgggcggtaaacggcacgaaggtggcatgcagcgattgcagatcgcgctcgcgcagattaaagcgctgttttgccagcaccacgatgctgcggccttccggcgtttcgtcggccagcgacgacagctgggcggcatcggcaagggttttctcttccacgccctgcgcaggcaggaatgccgaagcctggcggttgccaagggtaatggtgccggttttgtccagcagcaggacgtcgacgtcgcccgccgcttcaaccgcgcggccgctggtggcgatcacgttcgcgccgagcatgcggctcatcccggcgacgccgatggccgacagcaggccgccgatagtggtggggatcaggcacaccagcagcgccaccagcaccgtgacgctgaccgcgttaccgctccaggcggagaagggccagatggtggcggtggccagcaggaataccagggtcagggcgataagcaggatagtcagcgcgatttcgttcggcgtcttgcggcgctgggcgccttcaaccatggcgatcatccggtcaaggaaggtttcgccggggttgacgctgcagcggatcaccagccagtcggagagaatacgcgtcccgccggtcaccgaggcgaagtcgccgccggactcgcggataaccggcgcggattcacccgtaatggcgctctcatccaccgacgcgccgccttcgataacttcgccatcgcagggaataatatcccccgcctcgaccagcaccacgtcgcctttacgcagctcttcggcggggacgtggtcaatttgcgcatcgtgctgcggcgcgcgcagcttacgggcaaaggcggtctttttgacccctttgaggctgttagcctgcgctttactgcggccttccgccatcgcttcggcgaagttggcgaacaggacagtgaaccacagccagagactaacggcggcggtaaatccggcgctgccggcgatctgcccgcttgccatggcaagagccagcagggtggtgagcagactgccaatccagacgataaacatcaccgggttacgccactgtacggcagggctcagttttttcacggcgtccagcagggcctgacgcaccagcgtcggctccagcagggctaatgatttgcgactcataacaggttgctccgcaatcgcttaaagtaaggaaaagtgttccgccagcgggccgagcgccagcgcgggaataaaggtcagggcgccaaccaacagcacggtgccgatcagcaggccgataaacagcgcgtcatgggtggcgagcgtgccgctgccggcgggctgaattttcttcgttaccagcgaaccggcaatcgccatcaccgggataatgactgcgaagcggccaaccagcatgcagaacgccagcagcaggttccagaacggcgtcgccgcgctgaggccgccaaaggcgctgccgttgttgttggccgccgaggtgacggcgtacagcacttcgctgaagccgtgcggcccggggttgaacatgcccgcgcgaccggcttcggtcatcatcgccagcgccgtgccgaggagcaccagcgtcggggtcacgaggatcgccagcgcaatcattttcatttcgcggacgtcaattttcttcccgaggtactccggggtgcggccaatcatcagcccggcgataaataccgccagcatcacgaacagcagcatgccgtacagacccgagccgacgccgccgaagaccacttcgcctatctgcatcagccacatgggaaccattccgcccagcgcggtaaaggagtcgtgcatggcgttgaccgccccgcaggacgcggcggtggtgaccacggcaaacaggctgctggcgagaataccgaaccggctctctttgccttccatattgatactgctgtcggcgccaaggctcagcagatgcgggttaccgcgggtttccgcccacatcactaccgccacgcagacgatgaagatgagcgtcatcgcccatagaatggcccgtccctgacggcgatcgcccaccacctcgccgaaagcgaagcacagcgccgccgggatgagaaagatcgccagcatctgcaccaggttggtcagcgcggtcgggttttcaaacggatgcgctgagttggcgttaaagaagccgccgccgttagtacccagcattttgatcgcttcctgtgaagccaccggccccatcggcagcatctggcgtaccccttcaagcgaggtaaagccctgattcggggaaaaactctgcggcacgccctgctgaataaagaacagcgcgatgagcagcgaaatgggcagcagcagccagagggtgatgcgggtcagatcgacccaggcgttgccaagggtgctgactttctgccgggcataggcgcgggtaagggcaaagatcaccgcgatgccggtggcggcggagaggaagttttgcaccgccagcccggccatctggctaaggctactcatggtggtttcaccggcataggcctgccagttggtgttgctgacaaagctcaccgccgtattcagcgccaggtcccacgacaggccgggcaggtgctgcggattgagcggcagcgagccctggaacatcagcagcgtgaacaggaccagcagacccagcgcattaaacagcagaatagcgaataaatattgataccagttcatctcctgagaacgaatgcccgccgcccgccataaaccgcgttcgatgccggccaggcccggtagcggggaatcattgatcatcgtcgccagcgccgtgcccagcggacgagccaggatcatcagcagcagaataaagctcgcgatgagtaaaaatccttgagcggccatcagaatgcctccgcgtgtatcagggcataaaccagataaaccagcaacaggaacaccagcgctacgccagcgattacgcctgcactcacaatccacctccgggtgtctttttgatttacgaggagaataggcagtcgggcgcaaagatttcgcaaaaatctgcggcgggggtgtaaaaaaaatataaaaatcgccaagaccacaatttaactaatggttagtattaatttaacttttttgtaactaagttaccgggtgaatgtaaataaaggctaaatacgtgctttttagtggtcggatgagtagtaaaattacagccaaagcggtactattttaagcagagaaacagattaactttaccggctttgcttgccggcctgacaaaggggagagaaattatggcgttgtacaaaacttatcctgctcatatcatctttgcgcgtcgcgctttcgccgtggctgctggcgtgctggcgctgccggtaatgctgttctggaaagatcgcgcccgtttttatagctggctgcaccgcgtgtgggcgaaaaccagcgaacagccggtatggctggcgcaggccgaaaaagtctccgcagatttttattaataacggtttatgcctcagcgggcgcgcgctgcggaaacgggctaatggcttgatatcctggcttatttaccctgtcttacccggcacagcgtgccaacagattgccttatcatcatgccgccggtttacccggcggtttttttttgccatgagtggcttacacttattcactccccgaaggttaagccggcgggagggttaaatataagtcgaacttatcaattttcatgatgaaaggaatgctatggccacccatctggtctggtttcgcgcggatttgcgcatccacgataacctggcgctcgccgccgcctgccgcgatccccatgccgaggtgctgggattatttatcgccacgccagggcaatggcgccagcacggtatggcgccgcgccaggcggcgtttatgatcagccaccttcacagcctgcaagcggcgctggccgaaaaggggatcccgctgcagattgaacatgccgcagatttcaccgccagcgtggcgctgctcgccagaatttgccggcagcggcaggtgacccatctgttttacaactaccagtacgaaatcaatgaacgccagcgcgatgcggcggtggagaaaaccttagcggaggtgacctgtcagggctttgatgacagcgttctgctgccgccgggcagcgtgctgaccggcagtcgtgaaatgtataaggtctttacgccgtttaaaaatgcctttattcgccgtttgcaggaagcgctgccggagtgcgtcgccgcgccgaaagtccgcgcgggcgggcccatcgctgcggcgtctgaagtgaaaatagattatccgcagacgccatttgatagcgagctgttcgccgcggatgaaaaaagtgccatcgcccggcttcgcggcttctgccagcaaaaggccgccgactatgagcagcagcgcgatcttcccgccatcgaggggaccagccgactgtcgccgtgcctggcggtgggcgcgctctcaccgcgccagtgcctgcaccgtttgcgggttgagcagccgcgggcgctggatggcgaagccggattggtatggctcaacgagcttatctggcgcgagttttatcgtcacctgatggtttactacccaaacttgtgtaaggggcggccttttatcgactggaccgataacgtggcgtggctggacgataaatccgcgcttcaggcctggcagcgcgggcaaaccggcttcccgattgtcgacgccgcgatgcgtcagcttaatgcgaccggctggatgcataaccgcctgcggatgattgtcgccagtttcctggtgaaagacctgcgcatcgactggcggctgggcgagcgctactttatcgaacagcttattgatggcgatctggcggcgaataacggcggctggcagtgggcggcttcaacgggtaccgatgccgcgccctattttcgtatttttaacccgacgacccagggagagcgcttcgacaaagcggggcagtttattcgtcaatggctgccggagctggccggggtacctgaaaaagcggtgcatcaaccgtggctgtgggcggagaaacagggcgtaacgctggattatccgcgcccgattgttgaccacaagcaggcgcggctggcgacgctggcggcctgggaagccgccagagagcttaagactccatcgccaggcgacgagtccggatcttaacggcgtgatacagccagatagccagcaccaggccgacgcaggccagcgcgccccaggttatctggctgaacacctcaatgtaggcattaattgaatagttgacggccccggcggcgtcgaacgacccctgcgaggtttgatcggcaatcacgcctgccagatagttagcgatagcgccggagagcagcatataaataccggtcagcaccccggtcacgccggggatctcaatacgggtaatctgcgacatcgccaccgggtcgataaacagctcggcgaagcccatcaccgccaggcccagcaccatcagcggcattgaagattgtccgtaagccgccgaccagcgtgcgctgagggtcaggatacagaaaccggcgctcatcaggccgaggcccagcgcgaatttgccccagatgcgcacggtacggttgccgttaatattctccttcaccagccacgccagcaccaccccacagagcatcaccgcaaaggcgttcaccgactggaacatcgcggtcggtatctcatagcccataaaatgacgattaacaaaacggtcgatatagaggctgatggagctgccgccctgctgcgcaaaggcccagaacagcaggctgaagcaggtgagcaccataatcagacgcagctctttacgctgcctggcggtctccgcccgcaggtagatccgcgtcagtaccgccaggccgataaccgtcgccacaatcagcgcgtaaaccgaccactcctgccagaacagcacggtgatcagcagcggcgcggcgatcagcagcaccagcagccagccccagtttggtaagacgaaactccgcgcccgcagcgcttcgcgattcacgccccgggtgtggcggaaatggtgattgccgctgaggaaaatcaccagcccggcgatcatgccgacggccgccagcgcgaagcccatcgcccagctgtactcttcctgcacgtagccgcaggcgattggcgcaacgatagacccgacgttgcccgccgcgtacatcagcgaaaaaccgccgtcgcggcgcgggtcggtgggttcatacagctcgccgagcaggcagctgacgttggatttaaacagcccgtagccgcagacaataatcgccagcgacagatagaggaaggtgggggagatttcgctggcaccgagcaccagatggccgatggccatcagcagcgcgccgagcatcaccgccatgcggttgcccagcagcttatcggccaggaagccgccgagaatcggcgtgacgtagactaaagaacagtaggcgctgaacagcgcataagcatgattatcgtcatacttgagctggttggtgagataaagaatcagcagcgcgcgcatgccgtaaaaactgaaatattcccagatttgcagcgcgacgacgtaataaatcgcccgcggctgtgaggattgtgtgttcatgtaatgccttgtcctgccgtaaaaaagaaagtcgatctttctgcatgaatagccattaactagcgatattcatggccttatgggctttctggttatttaatatgctgtaatagtgcataaatatacacgaatgcgcgaacgagggagtagacaaattgcgggatttcgcgaaaagtcaaaatggacggcgaagcggcagaactatcgactgaccggacggataccgttatgttattcctctgtacagaacgaaaacctggtggaacggcaatgaaaaatagtgaactggaacaactgattaatgaaaaactcaatagcgcggccatcagtgattacgcccccaacgggctccaggtggaagggcgcgaaacgatacaaaaagtcgtcaccggcgtgaccgccagccaggcgctgctggatgaagccgtccgcctggaggccgatgcggtgatcgtccatcacggttacttctggaaaggcgaatcgccggtcattcgcggcatgaagcgcaatcgcctcaaaacgctgctggctaacgacattaacctctatggctggcacctgccgctagacgctcacccggaactgggcaataacgctcagctggcgtcgctgctcggcattaatgtgatgggggaaattgaaccgctggtaccgtggggcgaactgtcgatggcggtatcgggcctggagctggcttcatggattgaagcgcggctgggtcgcaaaccgctgtggtgcggcgacaccgggccggataaagtcgcccgcgtggcctggtgcaccggcggtgggcaaagctttatcgacagcgcggcccgctttggcgtcgatgcgtttattaccggtgaagtttcagagcaaaccatacactcggcgcgcgagcaggggctgcatttctacgccgccgggcaccatgccaccgagcgcggcggcattcgcgcgttaagcgaatggctgacggaaaataccgaactggacgtcacgtttattgatatcccgaacccggcctgatgaacggaggcaaaagtgcagcgagcgcgttgttatttattaggtgaaacggcagtcgtactggagcttgagcctccggtgacgctggaaagccagaagcggatctggcggttagcccagcggctggtaggccataccgaggtggtggaagccatcccgggcatgaacaacattaccgtgatattgcgcaacccgcagcagacggcgtgggacgcgattgagcgcctgcagctctggtgggaggagtgcgatacgctcgaaccggaatcgcgggaggtctcggtcccggtagtttatggcggcgaatacggaccggatctgggagaaattgcccgccacagcggcctgagcgaaaagcaggtggttgagctgcattcgtcggtggagtacgtggtgtggttcctcggcttccagccggggttcccgtacttcggcggcctgccggagcagctggcgatgccgcgacgggcggagccgcgcctgctggttcccgccgggtccgtcggtattggcggggcgcaaaccgggatctatccgctggcgacgcccggagggtggcagctgctggggcgtacgccgctggcgctgtttgatccgaagcgcaaggagccggtgctgctgcgttccggcgacagagtgcgtttcgtgccgcaaaaggagggcgtatgttaaaaattatccgcgccggaatgtatacctcggtgcaggacggcgggcgtgaagggctgcgtcagctgggcatcagccgctgtggcgctatggataagccggcgctggtcaccgctaatctgctggtgggtaacggcgctaacgccgcggcgctggagataacgctgggccaggtggatattcagtttgaacgcagcggctggtttgcgctgaccggcgccgcctgcgaggcgaagctcgatggcgagccggtatgggtgggctggcgaacggcggtcaaggccgggcagcatctggtgctcaagaacccgcagcacggcgtgcgcagctacctggcggtggcgggggggattgcggtgccgaaggtgctgggttcgcgcagcaccgatctgaaagtggggattggcggtctggaaggtcgacgtttgcaggacggagaccggctgaagctggggaaatctgataagcagttccgcgggccgcgcggcgtgaagcagctccccatcggcaaccgcatccgcgcgctgcccgggcccgagtaccaggagtttgatagcgtgtcgcaggacacgttctggcgctcgccgtggcagcttagcccgcagagcaatcgtatgggctatcgtctgcaggggcaaccgctgaagcggacgaccgaccgcgagatgctttcgcacggcctgctgcccggcgtggtacaggttccgcataatggccagcccatcgtactgatgaacgacgcgcagaccaccggcggctatccgcggattgcgaccattatcgaggccgatatgtaccagctggcgcagatcccgctgggacagccgatccactttgttccctgctccctggaggaggcgctgaaggcgcgcgccgacagacaacgttattttgaacagctggcatggagactgaacgatgaagattgatttaaacgccgacctgggcgaaggctgcgccaacgatagcgcgctgctgcagctggtctcttccgccaatatcgcctgcggtttccatgcgggcgatgcggtgatgatgctgcagtgcgtccgcgaagcgctgaaatatggcgtcgcggtgggcgcgcaccccagctttcctgaccgggaaaattttggccgtacggcgatgcagctgccgccggaaacggtttatgcgcaaacgctgtatcaggtcggcgcgctggcggcgctggtgcgcgcgcagggcggcgagctgcagcacgtcaagccgcacggcatgctctataaccaggcggcaaaagatccgcagcttgctgacgctatcgccaaagcggtatatgacgttgacgcgggtctggtgctggtaggcctggcgggcagcgagctgattcgcgccgggcagcgttatcagctgaccacccgccaggaggtcttcgccgaccgcggctatctggcggacggcagcctggtgccgcgcacccagcccggcgcgctgatcgagagcgaagagcagtcgctggcgcaaaccctggaaatggtgcagcacagccgggtgcgcagcatcaccggcgaatgggcgcacgtggtggcggaaaccgtctgcctgcacggcgacggcgagcacgcgctggattttgcgcgccgcttgcgcgcggcgtttgccgggcgcaatatacaggtcagtgcggaagtagaagaataaaaataatagtatcaagtaattaacattaaacaacaattcacaacaacatacaggatgtaactatgggagagtcattatctctctggccactgatcggcattgcggcgatcgtggtcggatttgttctgcgttttaacccggtactggtggttattgtgtccgggatcatcacgggtctggcggcgcatatgccgatcgcgaccattctggaaaagctgggagaaggatttcttaatacccgcaacctgccgtttattctgctgctgccgctggcggtgattggcctgctggagcggcacggtctgaaagagcgcgcgcagacgtggatcgcgaagatccgcagcgccaccgccggtcgtctgcttatcgtctatcttttcgtgcgtgaagtgaccgcggcgatgggcctcaccagcctgggtggtcatccgcagatggtgcgcccgctgctggcgccgatggcggaaggggcggcggagaaaaacttcggcgccttgcctggcgaggtgcgctatcgtctgcgcgcgatgtcggcggcgaccgacaacgtgggcctgttcttcggggaagatattttcgtcgccttcggggcgattatctttatgcataactttatgctggagtcgggcggcattcagaccgagccgctgcatatcgccctatgggggatcccaacggcggtctgcgccttcctgatccactctgcccgcctgtggcgcctcgaccgccatctccagcgcgagctggacaaggttaacgccgggcaggcgaaaggcggtgccgcatgaattttcagcaaacctggctgtactggctggcgggcgcggttctgctggcggtggcggtgatgtcatggcgcgataaggccaacccgcgcaggctgacaaccggcctgttctgggggctgtatggcctggtgtttctgtttggcgactggacctatgagctggtcggcgacaagcgggccgttaatatcggcgttggcgtggtggtggtggtgctggcgctgatcgccggttttggcggcgtgcgcctcggtcgctatcatcagcgctcgcaggaagaacgtaccgccagcgccgcgcgtcttggcaatcggctgtttttcccggcgctggcgatcccggtggtgacggtgatcggcgtgctgctgtttaataatctcccctcgctgcaggtcgctatctttggcccgggcaatcacgccacgctgatcacgctgttttcgatgaccgcgggcacgctgctcggtctggtgatggctatccgcatgacccatgaaacggccgcgcagccgttacaggaagcccgccgcctgctggactcggtgggctgggcgtttattttgccgcagatcctcgcggtgctcgggctgctgtttaccgccgccggcgttggcaacagcatctcctggctgacgcagcactacctggcggtagacagccggtttatcgctgttgccgtctataccctgggaatggcgctgctgacgatggtgatgggcaacgctttcgccgcgtttcctatcgtgacggcgggggtcgggatcccgattctggtgctgcagcacggggggaacccggcggtgatggcggccattggcatgttctccggctactgcggtaccctgatgacgcccatggcggcgaacttcaatatcgtgcctgccgcgctgctggagctgccggataaaaacgcggtcatcaaagcccaggtgccgaccggcgttatgctgcttatcgtgaacgtatttttgctctatttcctgatgttcctgtaaggagggatcatggctggcgtgttaattaccggttttgagccgttcggcggcgaagcggttaacccttcgtgggaagtggtaaagcggctggacggcgctattatcggcggacagccggtggcggcgcggcagctgccgtgcgtctttggcgacgccctgacggcgcttaacgccgcgttggatgagctggatcccgtcctgaccctggcgattggtcaggcgggcggtcgcgtcgacatcaccgttgaacgggtggcgatcaacgtcgatgatgcgcggatcccggacaataaaggcctgcagccgatcgacgtaccgatcgctgccggcgggccggcggcgtacttcagcacgctgccgatcaaagcgatcgtaaccgccctgcgcagccgggggatcccggcgtcggtgtcgcagacggcggggacgtttgtctgtaatcacgtgatgtacggcctgctgcacagcctgcgtcatcgcagcggcgcgaagggcgggtttatccatattccgtatttgccggagcaggccgcggctcatcccggcgaagccagtatggcggtagagacggttcaggccgcgctggaaacggccatcgccgttgccctgcagcaggatggcgatgtgaaagtcggcggtggggcaacgcattaacacaaggacaagattatgccggaaggtccggaaattcgccgcgcggcggatagcctggaagcggcgattaaaggcgaacccctgaccggggcgtggttcgccttcccgcagttacaacattaccaacctcagctggtcggccagcgagtgacgcacattgaaactcgcggtaaggcgctgctgacccacttctccggcgggctaacgctgtatagccacaatcagctgtacggcgtctggcgagtggtggacgcgggggcgcagcctgaaacgacgcgcgttctgcgcgttcggctgcagaccgcgcgcagggcgattttgctctacagcgcctctgatattgagatgctgacgcccgagcagctcgcccgccatccgtttttgctgcgggtcgggccggatgtgctcgatatgcgccttagcgttgaacaggtcaaagcgcggctgctgtcggcgaaattccgcaaccgccagttctccggtctgctgctggatcaggcgtttcttgccggattaggcaactatctgcgcgtggagatcctctggcaggtggggctgaccgggcggcataaagcctctgaactggatgaaaaacagctcgatgcgctggcgcatgcgctgctggagatcccgcgattgtcctacaacacccgcggtctggtggacgagaataagcaccacggcgcgctgtttcgctttaaggtttttcatcgcgaaggggaggcctgcgagcgctgcggcggaataatcgagagaacgatgctatcgtcgcggccgttttactggtgcccgggatgtcagcaataaaaaaacgcgccttcaggcgcgttttttgtcgctgcgatagccctcttaacgggcgatatcgtttttgaaatcgcgcttttcgtagccggtatacagctggcgcggacgggcgattttcatgccgtcgctgtgcatttcgttccagtgcgcaatccagcccacggtacgcgccatcgcgaagataacggtaaacatagaagacggaatgcccatcgctttgaggatgataccggagtagaaatcgacgttcgggtagagtttcttctcgatgaagtacgggtcgttgagcgcgatgtgctcaagctccatggccacttccagcagatcgtctttggtaccgagctctttcagcacttcgtggcaggtctcacgcataacggtggcgcgcgggtcgtagtttttgtacacgcggtggccaaagcccatcaggcggaaagagtcgtttttgtctttcgcgcgacggacgaattccggaatgtgttcaacggagctgatctcttcgagcatcttcagcgccgcttcgttggcgccgccgtgtgccggtccccacagggaggcaatacccgcagcgatgcaggcaaacgggttcgcgccggaagagccggcggtacgtacggtggacgttgaagcgttctgttcgtggtcggcgtgcaggatcaggatacggtccatggcgcgttccagaatcggattcacttcatatttttcacacggcgtggagaacatcatattcaggaagttacccgcgtaggagaggtcgttgcgcggataaacgaaaggctggccgatagagtacttgtaacacattgccgccatcgtcggcattttggagagcaggcggaatgcggcaatatcgcggtggcgtgggttattcacatccagcgaatcgtgatagaacgcggccagcgcaccggtgataccgcacatgacggccatcgggtgagaatcgcggcgaaacgcgtggaacagacgggtaatctgttcgtgaatcatggtgtggcgggtaacgatggttttgaattcgtcgtactgggcctgggtcggcttctcaccgttcagcaggatgtagcatacttccagatagttggagtcggttgctaactgatcgatcgggaaaccgcggtgcagcaggataccttcatcaccgtcgataaaggtgattttagattcgcaggatgcggtggaggtaaaaccagggtcaaaagtaaacacgccttttgaaccaagactacgaatatcaataacatcctgaccgagcgtgccctttagcacatccagttcgatagcagtatcaccacccagggtgatttttgctttagcatcagacatttatggtctccttagcgcctttattgcttaaggctgccgggtggtggatttgcattcagcccgtagcagatgacattaccagtttgttatgttgcacatcgctctgcgtcgcgaaaagggcagggtacagagcaagggcgcttgatggtacgtcttcagcctacgacgaaacaacagcaaatcagcgttttagcagcccgaatattataaaactatataccactaataactgtcctgattacatcggtcaatactctctcactgttgcataacttattctcaggtaaaagagtgaccccataacttttgcgtattattgcatttatctggtaatggttgtaacaataatgtttaatatttgtcaaatcagatgattaaaaattaaaaatatgttgttatcgtgacatggatcactgttcgggagaaaacccgacaaactatatgtaggttaattgtaatgattttgtgaacggcctatactgccgccaggtctccggaacaccctgcaatcccgagccacccagcgttattttgtcacgctttaactcctggaaaggcgttttaacatgacttttagttatagataaggacgctgtctgacccgcaagcagaccggaggaaggaaacaataagaacagcatgtgggcgttattcatggtaagaaatgtgaaaaaacaaagacctgtcaatctggatctgcaaacgatccggttcccaatcacggcgatagcgtccattctccatcgcgtatccggagtgatcaccttcgtggcgatcgggattctgctttggctgctgggcaccagcctttcctctcccgaaggttttctcactgcggcatccattatggatagcttctttgtgaagttcatcatgtggggcatcctgaccgcgctggcgtatcacgcggtggtcggtattcgccacctgctgatggattttggctaccttgaagaaaccctcgaagtagggacacgctccgccaaaatttcttttgttattactgtcgtgctttcacttctcgcaggagtcctcgtatggtaagcaacgcctcagcactaggacgcaacggcgtacatgactttattctggtccgtgctaccgctatcgttctgaccctctacatcatctatatggttggcttctttgccaccaccggtgaaatttcatgggaagtctggacgggctttttctcctccgcgttcactaaagtcttcaccctgctggctctcgtttccattctgatccacgcctggatcgggatgtggcaggtattaacggactacgttaaaccactggccgtgcgcttaattctgcaactgctgatcgttgttgcgctggtggcttacgttctttatggatttgttgtggtgtggggtgtgtaatgaaattgcctgtcagagaatttgatgctgttgtcattggtgccggcggcgcaggtatgcgcgcggcgctgcagatttcccagagcggccagagctgtgcgctgctctctaaagtttttccgacccgttctcataccgtttccgcgcagggtggtatcaccgtcgcgctcggtaatacccatgaagataactgggaatggcatatgtacgacaccgttaaggggtcggactacattggcgatcaggacgccatcgaatacatgtgtaaaaccggcccggaagcgattctggagctggatcatatgggtctgccgttctcgcgtctcgaaaatggcacgatttatcagcgtccgttcggcggccagtcgaaaaacttcggcggcgagcaggcggcacgtaccgctgcggcggctgaccgtaccggtcacgccctgctgcacaccctctatcagcagaacctgaagaatcacaccactattttctccgagtggtacgcgctggatctggtgaaaaacgccgatggcgcggtggtcggttgtaccgccctgtgtatcgaaaccggtgaagtggtttacttcaaggctcgcgccaccgtgctggctaccggcggcgccggtcgtatctaccagtccaccaccaatgcccatatcaataccggcgacggcgttggtatggcgatccgcgccggcgtgccggtgcaggatatggaaatgtggcagttccacccgaccggtatcgccggggcgggcgttctggtgacagaaggctgccgcggtgaaggcggctacctgctgaacaaacacggcgaacgtttcatggaacgttatgccccgaatgcgaaagatctggcgggtcgcgacgtggtggcgcgttccatcatgatcgaaatccgtgaaggtcgcggctgcgatggtccgtggggcccgcacgccaagctgaagctcgatcacctcggtaaagaagtgctggaatcccgcctgccgggtatcctggagctctcccgcacctttgcccacgtcgacccggtaaaagagccgattccggttatcccaacctgccactatatgatgggcggtattccgaccaaagtgagcggacaggcgctgaccgtcaacgagcagggcgaagatgtggttattccgggactgttcgcggtaggcgaaatcgcctgcgtatcggtacatggcgcgaaccgtctgggcggcaactcgctgcttgacctggtggtctttggccgcgcggtgggtctgcacctgcaagagtctatcgccgagcagggcgtactgcgcgacgcgacggatgaagagatcgacgcttctctggaacgtttgaaccgctggaacggcaaccggaatggtgaagacccggtcgaaatccgcaaagcgctgcaagagtgtatgcagcataacttctcagtcttccgcgaaggggatgcaatggcgaagggccttgagcagctgaaagccatccgcgagcgtctgaaaaacgcccgcctggatgatacttccagcgagttcaacacccagcgcgttgagtgcctggagctggataacctgatggaaaccgcttacgccaccgcgatgtctgcgaactaccgtaccgaaagccgcggcgcgcatagccgcttcgacttcccggatcgtgatgatgaaaactggctgtgccattccctgtatctgccagagtcggaatccatgacgcgtcgtagcgtcaatatggaaccgaagctgcgtccggcattcccgccgaagattcgtacttattaatgcggagacaggaatatgaaactcgagttttcagtttatcgttataacccggacgtagacgatgctccgcgcatgcaggattacaccctggaagcggaagagggtcgcgacatgatgctgctggacgcgttaatccagctgaaagagaaagacccgtcgctgtcgttccgccgctcctgccgtgaaggggtttgtggctccgacggtctgaacatgaacgggaaaaatggtctggcgtgcatcacgccgatctccgcgctgaatcagccgggtaagaaaattgttatccgtccgctgccaggattaccggttatccgtgatttggtggtagacatggggcaattctatgcacaatatgagaagattaagccttacttgttgaataatgggcaaaatcctccggctcgcgagcatctgcaatcgccagagcagcgtgagaaactcgatggtttgtacgagtgtattctctgcgcatgttgttcaacgtcttgcccgtcgttctggtggaacccggacaagtttatcggcccggccggcctgctggccgcgtatcgcttcctgatcgacagccgcgataccgaaaccagcgagcgcctcgaagggctgagcgatgctttcagcgtattccgctgtcacagcattatgaactgcgtcagtgtgtgtcctaaggggctgaacccgacgcgcgccatcggccatattaagtcgatgctgctgcagcgcagtgcgtaagtaacccggtctgccccggatggcgctagcgcttatccgggctaccaaaagcagtagccccggcagcgttcgcgccgccgggggatatagcaggaaacctctaaaaactgccatattaatagtaataatcgagatgttcagcgcgagacaaggcgcgagcagaacgaatctccgggagcatagtgaactatgtgaccggagtgagtgagggtcgcaacacagtcgcagcctgaacaaagaagattattagacagtttttaaaggttccttagcggacgaaaccacaactcatccgcaacaagtgaaccccggcacgtacaacttctgtgcgtggtagtttctacggcgaaataagcatataaatgcttaagggatcacgatgcagaacggcgcaatgaaagcctggctggactcttcttacctctctggttcgaaccagagctggatagaacagctctatgaagacttcttaaccgatcctgactctgttgacgccaactggcgttctatgttccagcagttacctggcaccggagtcaaaccggatcaatttcattccaaaacgcgtgattatttccgccgcctggcgaaggatgcctcgcgttacacttcttcgatttccgaccctgacaccaatgtgaagcaggttaaagtcctgcagctcatcaacgcataccgcttccgtggtcaccagcatgcgaatctcgatccgctgggactgtggcagcaagagagagtggcggatctcgatccggcttaccacgatctgaccgaggccgatttccaggagatctataacgtaggttcttttgccatcggtaaagacacgatgaagctgggcgatctgatctctgccctgaagcaaacctattgtggctccatcggcgcggaatatatgcacattacttctaccgaagaaaaacgctggatccagcagcgtatcgagtcggtagcgggcaaagcgagctttagcgccgaagagaaaaaacgcttcctgagcgagctgaccgcggcggaaggcctcgaacgctacctcggggcgaaattcccgggcgcgaaacgcttctcgctggaaggcggcgatgcgctgatcccgatgctcaaagagattatccgccacgcgggtaagagcggcacccgcgaagtggtgctgggcatggcgcaccgcggtcgtctgaacgtactggtcaacgtgctgggtaaaaaaccgcaggacctgttcgacgaatttgccggtaaacataaagaacatctcggtaccggtgacgtgaagtaccacatgggcttctcgtccgacatggaaaccgaaggcggcctggtgcacctggcgctggcgtttaacccgtcgcacctggaaatcgtcagcccggtggttatcggctccgtacgcgctcgcctcgatcgtctcgacgaaccgagcagcaacaaagttctgccgatcaccattcacggcgacgccgcggtcaccggccagggcgtggttcaggaaaccctgaacatgtccaaagcgcgcggttacgaagtgggcggtaccgtacgcatcgtgattaacaaccaggtgggattcaccacgtctaacccgctggatgcgcgttctaccccgtactgcaccgacatcggtaagatggtgcagtcgccgattttccacgtcaacgccgatgacccggaagcggtcgctttcgtgacccgcctggcgctggatttccgtaataccttcaaacgcgatgtcttcatcgacctggtttgctaccgccgtcacggccacaacgaagccgacgagccgagcgcaacccagccgctgatgtatcagaaaatcaaaaaacatccgaccccgcgcaaaatctacgctgacaagctggaagccgataaggtcgcgacgctggaagacgctaccgagcaggttaacctctaccgcgacgcgctggatgccggcgaatgcgtggtgcaggagtggcgtccgatgaacatgcactcctttacctggtccccgtacctcaaccacgagtgggatgagagctatccggacaaagttgaacctaagcgtctgcaggagctggcgaaacgcatcagtacggtgccggaagccgttgagatgcagtcgcgcgttgcgaaaatctatggcgatcgtcaggcaatggccgccggcgagaagctgttcgactggggcggcgcggaaaacctcgcctacgccacgctggtcgatgaaggtatttcggtgcgtctgtccggcgaagactccgggcgcgggaccttcttccaccgccacgcggtgatccataaccagaaaaatggttcaacctatacgccgctgcagcacgtccacaacggtcagggccattttaaagtctgggactccgtgctgtcggaagaagcggtcctggcgtttgaatacggctatgccaccgcagagccgcgtactctgaccatctgggaagcgcagttcggcgacttcgccaacggcgcgcaggtggttatcgaccagttcatcagctccggcgagcagaagtggggccgtatgtgcggtctggtgatgctgctgccgcacggctacgaaggccaggggccggagcactcctccgcgcgtctggaacgctatctgcagctctgcgccgagcagaacatgcaggtttgcgtaccgtccacgccggcgcaggtttaccatatgctgcgtcgtcaggcgctgcgcggtatgcgtcgcccgctgatcgtgatgtcgccgaaatcgctgctgcgtcacccgctggcggtatcgagcatggacgaactggctaacggcaccttccagccggcaattggtgaaatcgacgatctcgacccgaaagccgtgaagcgtgttgtgctgtgctctggtaaggtttattacgacctgctggaacagcgccgcaagaaagagcaaaaagatgtcgctatcgttcgcatagagcagctctacccgttcccgcaccaggcggtacaggaagcgctgaaaccgtatgcgcacgtgcatgattttgtctggtgtcaggaagaaccgctcaaccagggcgcgtggtactgcagccagcatcacttccgtgaagtgattccgtttggggcctctctgcgttatgcaggccgcccggcctccgcctctccggcggtaggatacctgtccgttcaccagaaacagcaacaagatctggtcaatgacgcgctgaacgtcgattaattaaaggatacataatgagtagcgtagatattctggttcccgacctgcctgagtccgtagctgacgcaacggttgccacctggcataaaaaaccgggcgatgcggttgttcgtgacgaagtgctggtagaaatcgaaactgacaaagtggtactggaagtaccggcttcagcggatggcattctggacgcggtgattgaagacgaaggcgctaccgtgctctctcgtcagatcctcggccgcctgcgtgaaggcaacagcgcgggcaaagagtccggtgcgaaagccgatgccaaagagtcgacgccggcccagcgccagcaggcttctctggaagaacaaaacaacgatgcgctgagcccggcgattcgccgtctgctggcggaacacagcctcgacgcggcggccattaaaggcaccggcgttggcggccgcctgacccgtgaagacgtggagaagcatctggcgagcgcgccggctaaagctgaagcgccggcggctgctcccgctgctgctgctgctccggcggcgcagctgggcaaccgctcggaaaaacgcgtgccgatgacccgtctgcgcaaacgcgttgccgagcgtctgctggaagcgaaaaactccaccgccatgctgacgaccttcaacgaagtcaacatgaagccgattatggatctgcgtaagcagtacggtgacgcgtttgaaaaacgtcacggtatccgcctgggcttcatgtccttctacgtgaaggcggtcgtggaagcgctgaaacgctatccggaagtgaacgcctctatcgatggcgacgacgtggtgtaccacaactatttcgacgtcagcatggcggtctccacgcctcgcggcctggtcaccccggttctgcgcgacgtcgatctgctgggcatggcggatatcgagaagaaaattaaagagctggcagtaaaaggccgcgacggcaagctgaccgtagacgacctgaccggcggtaacttcaccattaccaacggcggcgtattcggttctctgatgtccacgccgatcatcaacccgccgcagagcgcgattctgggtatgcatgccattaaagatcgtccgatggcggtgaatggtaaggtggaaattctgccgatgatgtacctggcgctctcctacgaccatcgtctgatcgacggacgtgagtcggttggctacctggttgcgattaaagagctgctggaagacccgactcgtctgctgctggacgtgtagtcagcaagagtatgacctaccgtaggccgggtaaagcgcgcgagcgccgttatcaggcctacaggtttataattattccctgaaggatggactgaacacatgaacttacatgaatatcaggcaaaacaactctttgcccgctatggcttaccggcgccggtgggttatgcctgtactactccgcgtgaagcagaagaagccgcttcaaaaatcggcgcgggtccgtgggtagtgaaatgtcaggttcacgctggtggccgcggcaaagcgggcggtgtgaaagtagtgaagagcaaagaagacattcgcgcatttgctgaacactggctgggcaaacgcctcgtcacctatcaaacagatgcgaacggccagccggttaaccagattctggttgaagcggcgaccgatattgataaagagctgtacctgggcgcggttgttgaccgtagctcccgtcgcgtggtctttatggcctctaccgaaggcggcgtggaaatcgaaaaagtggcggaagagaccccgcacctgatccacaaaatcgccatcgatccgctggcgggtccgatgccttaccagggccgcgaactggcgttcaaactgggtctggaaggtaaacaggttcagcagttcaccaaaatctttatgggcctggcgaccattttccttgagcgcgatctggcgctgatcgaaatcaacccgctggtgatcactaagcagggcgacctgatctgtctcgacggtaaactgggcgctgacggcaacgcgctgttccgccagccggacctgcgcgaaatgcgcgaccagtcgcaggaagacccgcgcgaggctcaggcggcgcagtgggagctgaactacgtcgcgctggacggcaacatcggctgcatggtgaacggcgcgggcctggccatgggcaccatggacatcgttaagctgcacggcggcgaaccggctaacttcctcgacgttggcggcggcgcaaccaaagagcgcgtcaccgaagcgtttaaaatcatcctctctgacgacaacgtaaaagcggttctggttaacatcttcggcggtatcgtacgctgcgacctgattgccgacggcatcatcggcgcggtagccgaagtgggcgttaacgtcccggtagtggttcgtctggaaggtaacaacgccgaactgggcgcgaagaaactggctgacagcggcctgaatattattgcagcgaaaagtctgacggatgcagctcagcaggttgttgccgcagtggaggggaaataatgtccgttttaattaataaagataccaaggttatctgccagggcttcaccggtagccagggtacattccactctgaacaagccatcgcttacggtacgcaaatggttggcggcgtaacgccgggcaaaggcggcaccacccatctgggcctgccggtgttcaacaccgtgcgcgaagcggtagaagcgaccggcgcaaccgcatccgttatctacgttccggcgccgttctgcaaagactccatcctggaagctatcgatgcaggcattaaactgattatcactatcaccgaaggcatcccgacgctggatatgctgaccgtgaaggtgaagctggatgaagcgggcgtgcgcatgatcgggccgaactgcccgggcgtgatcaccccaggcgaatgcaaaatcggcatcatgccgggccacattcaccagccgggtaaagtgggcatcgtttcccgttccggtaccctgacctatgaagcggttaagcagaccactgattacggcttcggccagtctacctgcgtgggcatcggcggcgacccgatcccgggctctaacttcatcgatatcctgaagctgttccaggaagatccgcagaccgaagcgatcgtcatgatcggtgagatcggcggtagcgcggaagaagaagcggccgcttacatcaaagatcacgtgaccaaaccggttgtcggctacatcgccggcgtgaccgcgccgaaaggcaaacgtatgggtcacgcgggcgccatcattgccggtggtaaagggacggcggatgagaaattcgccgcgctggaagccgctggcgtgaagaccgttcgcagcctggccgatatcggcgaagcgctgaaaaccgtaattaagtaataagtaaaaaaacagccctgacgttctgcatggttaagggctggtccaatttcgacatggttggccatctgatgatggccttttttttgcctgccgctgcgccatcaggcgttacgccgttttcgcccgcgatttcatgccgtttaatcatattcatctgcgcaaatgagattattttttgcgtccggcatcatcctttttatccgcactattttgcatattaagtgcttgcaaaaggcggtggggaataatgtggtgcgaaagaaaaggcatgaacaatgggagggctttagctcgctggcagcgcttttttcgcgggctaccgggctggagaccacggtgattgaggcgaatgacaatcgactacctgctggctatggtgggttaaatttctttgccttaccgctgattcaggacaatacattatccggttatattatttgcgaccatcataacgcgaccgacaaccagcatcgggcggcggcgataagattactgcattttatcgttaataatatgtctgcgattgcagaaaacaggcaagtggacgagaaaccgttgcggcataagagagagttttattattcgcaaaaatcgtcgcatgaaataaaactgctgtcggcattacgctatattgatgaaaatttatatggtgagctgtctttagagaccgtcgccgctcacgtttgtttaagcgcaaattattttagtcgtttttttaaaaaacgccagggggtgaattttaaagtctgggttaatcagcgcaaaatgcagcgtgccggagaactgcttggcgatccgtcatattcggtagacagcgtagcgcgtaagcttcagtttgcgcaaaccagctacttttgtcgggtgtttcgcgccgctcatcgcaccagcccgcagtcgttccgcgatcggcatctcgcagccgcttcacggtaagtcgattagccgccgttttatcgttaatacagatttttcctggagcgctcataatgtgtggccgatcgcggaaaaattttcatttatgctcaccagcgggcaattaaatttcaccgtctcatcgactgacttcgcaaataaacaagttaatgtgaaaaaatattgacaacttattgctgttatttgcatggcaatcacattgtttaaattgtgtttattgtagtgcctgggtattattggttattatttgatcaataacagtgtgcattaatcatggaatagatcaatgacatctgaaggtaaaataaaatataacacccggggctaatctgatgtccttgcgcgctttttttatctattaaacaattttttgcacgccgtaaatggaagacgttatgagaggaaaaatccccaaaactgaattactggtgacctttgaggttgtggctcgccacgaaagttatactcgagcagcggaagagttggctttaacacaaagcgccgtgttccgacaggtcacggcgctggaggatttcctccatacgtcattatttaatcatgctaaaaaaaggatttttttaaatgcggctggcaagcattatttgactatcgttaaggaaacgctaaacaaactggaacgtgataccaactccattatgacatggcaaccgacggtgcaggtgcttgagctggccgtcaatcctacctttagcacccactggctgatccccaacctgcgcgagtttaataaattacatccgggcattatcgttaatattcattcgctggctaatattggcgattttcttagccgcgagtacgatgccgccattatgcgcgaggacttttgctcgccgtgggcggaggttgagtatctgttcgaagaggaaattctgccggtgtgcggctgcgggctgctgtccgaacccgggcagaagctggcggtcgaggagctgctgggcgagtttccgctgctgcatcaaagcacgcgaattcacggctggcaggagtggtttgcgctgtcgaatatcaccagcccgcagatcaacatcggtccgcgttttgacctgctctcaatgctgattgcggcggtgcgttcgaacctgggggtggcgctgctgccgcgttttgccattcagcatgacctggatagcggtgagatggtgatcccctgcgatgtaccgattcgcaccggcaaccgcttcattatgacgtggcaggaggataaagcggaatcccgacatttacaggtattccgcgagtggctgctgcaaaaatcggtggtctcggcagcctgacggcgcgttgtcagcgccgcagacggcggtgccgggcgcagagtggcatcatttcccggaggcgatgctgcgcatctgtccgggctaccggcccgcagacggcggtgaacccgtagcccgggcaaggcgcatcaagcgccgcccccgggagcatagcgcagagtggctgaatttcccggaggcgatgctgcgcatctgtccgggctaccggcccgcagacggcagtgaacccgtagcccgggcaaggcgcgtcgagcgccgcccccgggagcatagcgcagagcggcatcatttcccggaggcgatgctgcgcatctgtccgggctaccggcccgcagaacgctgtgaacccgtagcccgggcaaggcgcgtcgagcgccgcccccgggagcatagcgcagagtggcatcatttcccggaggcgatgctgcgcatctgtccgggctatcggcccgcagacgaatgtgaacccgtagcccggctaagcgtagcgcgagccgggtaaaactaccagtcgattcccacctgcgcctgaataccgctgtcaaaggcgtgcttcaccggacgcagctcactaaccgtatcggcaagctccagcagccgggcgtggcagccgcggccggtgacaatcacgttctgccgtggcggacgattctctatcgccgcgatcacttcctgagtatccagatagtgatacgccagcatataggtaagttcatccagcaccaccagatcgtagctcgggtcggccagcatgcgcttgctctcctgccatacggccgacgccgcctcgatatctgcctcccggttttgcgtttcccaggtaaagccggtgcccataatgtgaaactcaacgcccagaggatgcagtgtgttgtactctccattatcccactggcctttaatgaactgggcaacaccgacgcgcttaccgtggccgacggcgcgcgttgccgtaccgaaggcggcggtggatttaccttttccgttgccggtgaagacgatcagaatgcctttttgctccgttgccgccgccacgcgggtagcaacctgcgttttcagcttctgctggcgctgacgatggcggtcgggattgcctcgcgcgtgcataaatgctccttagtgtcctgccggacaggtggcgcagcggtgctgctgctcgaactggctaaagaagttgttgcctttgtcgtcaaccagcacaaacgcgggcagattttcgacttccatcatccataccgcttccatgcccagctccggatactccaggcagcgcaaacttttcacatactgctgcgccagtagggccgccgcgccgccgatgctgccgagattaaagccgccgtgtttatggcaggcctcggtcacctgctggctgcggttgcctttggaaagcatgatcagactgccgcccgccgcctggaaagcgtcaacatacccatccatgcgtccgccggtggtggggcccagcgagccgcaggccagattattcggcgttttcgccgggccggcgtagtagacaatatgcttgcgcatatactccggcatcggttcgccgttatccagacgcgctttgatttgggcatgggcgatgtcgcgggcgacgacaatcggaccgctcagcgatagccgggtgcccacgggcagggctgacaggtcgtggaggatgtcgcgcagcggccggttcagatcgagctggacggtctgcgccccgttttctatgcgctgagaatcagggataaacttgcccgggttatgttccagcttctccagccagatgccgtgtttgttgattttggctttgatgtttcggtcggcggagcaggaaagcgccattgcgatagggcaggagccgccgtgccgcggcaggcgaatcacgcgaatgtcgtgggcgaagtatttgccgccaaactgtgcgccgatgccgaactcgcggctggctttgagcagcgccgcttccagcgacgtatcgcgaaacgcctggcccagttcgtttccgctggtgggcagattgtcgtaatattttgtcgaagccagcttcgccaccttcaacgcctggtccgccgacaggccccccaccacaaaggcgatgtggtacggcgggcaggcggcggtgcccagcgccttcattttttcaatcaggaaggcggtgagtttttccggctgcagaatagattttgtttcctgaaatagcgcggctttgttcgccgaaccgccgcctttattgacgaagaggaagcggtattcactgcccggcaccgcgctgatatcaatctgcgcgggcaggttggtctcggtgttgacctcggtatacatatcaaggggggcattttgcgaatagcgtaaattgttttcctgaaaggtggtgtagatgccctgactcagagcttccgcgtcgttgcctccggtccagacgttctggcctttgctcgcgacgatggtggcggtcccggtatcctggcagtttggcagcacgccttttgccgagacttcggcgttgcgcagcagctgtagcgcaacgtatttatcgttgccgctggcctgcgggtcgtgcaggatgctggcgatctgctttaagtgcccggcgcgcaggaaaaacgacgcctcataaaatgcctgctgagccagcaatgttaacgcttccggcgcaaccttgatgacctcttctccatctaactctgtcaccttaacatgttgattcgttagcagttcatattcggtattatcgttgctctgaacaaaaagttcctgccagacaaagggtttcgacattttacttctcactatttcgctaaaaagagattggcccgcgtcgcattcgcgacgtactcgatggtctgctgggcgcggacgctgttgccggctgcatccagcggaggggagtagacggcgatagcgtattgcccgggaacgacggcgaccattccgccgccaacgccggattttgccgggataccgacggtgtacagccatttgccgctgccgtcgtacagcccggcgatcgccatttccgccagcacctgcgggacgtagctggcggtgagcagctgcttgccgttgaacggtgatttgccattgttggcgagtacggcccccattttggcgagctgctcaacggtgatatccaccgaacactgacgggtgtagatttcgacggcttcctgagggtcgccatagaagctgcggtatgaattcatcagcatcgccagcgcctggttatgctgattggtctccatttcggattgaaataccggctcgttaacgctcagggagctgtcggcccaggcgttgaggttgttgagaatgttgttccagcggtcggttttgtctttcgccgcaatcaggctcacggtgctcatggcgccggcgttgactaacgggttctccggcgcgccttgcgtgagctcgacggctaagccggaattgaagggcaggccggtcgcgttcgcgccgagtttatccagcacctcctgcggcccgcgctgctccattgccagcgccagggtgaaaactttacttaaggattccatcggaaaggcttttgtcacgtcgccggtctggtaaattttgccttcgaccgtcgcgagcgtaatggcgaaattattcgggctatagctcgccagggcagggatatagtcggcgactttaccgtcgtgattactcttatatttctgatgtgcctgctcgatgatgctggcgtagtccggcgcgctttgcgcctgcgcggcggcgctaaacagtaagctggcggttaagatgcaggtgccaagaaatttcacgttcatggggtgtcccgttgggatgattggagggaaccgggccggacgtatccggcctggggctcatagccattttgctgtcaggacatcgccacttctgacgtttcgctggcagggcgctcctgctccggttttttgaccggggcggtgccgcggcagccttctccgtaatgctcgccttcccaacggccaacgatggcggcgcccatggcgttactcatcacgttggtggcggagcgacccatatcgaggaacgggtcgacgcccatcagcaggatcaggcccgcttccggaatgttgaactggttcagcgtcgcggcgataaccaccattgaggcgcgcggcacgcccgccatccctttggaagtcagcatcaggatcagcagcatggtgatctgctcgcccatgctgaggtggacgttacaggcctgggcgataaacaccgtggcgaacgagcagtaggccatggagccgaccaggttaaaggagtaaccgatgggcaggacgaagctggcgattttggaagagacgccgaatttttccagcttatcgagggttcctgggaaggcagcttctgagctggatgtggtgaaggccagcagcgcgggctcgaagatcgctttggtcaggcggctgatacatgggccgacaatcaccgtcgacaggccaatcaggattgcccacagcatgcccagcgtcaggtagaactcacccataaagatcccggcgctgaccatcacgccaagaccgcgctcggcaatcagcccagagatggcggcgaaaacggtcagcggcgcgaacagcatgacgtaccctgtgagcttcagcatcacgtggaccagcgaatcgagcaccttcacaatgggctcggctttttcgccgatcgccgccaggctgcagccgaggaaaatagagaacaccacgatttgcagaatttcgttgcgcgccatcgcatcaacgatgctggtgggtaccgcgtgcgagataaacactttcagggtgaagggctcggactgaacggcggccacggctccggcatcgtgggggacaaagttgatgcccgcgcctggctggaacagattgacgatcaccagacccagcgcaatcgacagcagcgaggcgcaaataaacaggaaaaaggttttagagaatatgcgcccgagcgttttcgcatcgcccattttggcgatgccgaccaccagcgttgatattaccagcggggcgataatcatttttaccaggcgtaaaaatatagtggtaaaaatggagatatcctgcgcataggattttgctgtatctgctgatgccatattattaatgatcaccccggcaatcatgccgagtatcaggcctaatatgatcattttggttaaacttatttttttcatatttactccatcggaacagggttagtcgtgaagtggtgtagggcggcgtacgcctgcgccaggcagcagcgcagacgtacgcctgtggtgactaaccgcataaattgtctggaatacagtgatacagcgaaatcctgtataccaatggatgttgttgtatttttatatccgtcgtctttcaatctgcatttttgttggctgcctttgctcacccctgtcacgtacggatgtaagctcctggggatgaatgagggacatccatgtccctcaccgaaggcagcctccggctgttcaaattcgttcctgacgaatttgtctctcagttgccgcctcaatgcaactcgaaatccattggatatagaattagaaatcgaactcaatacttaatagcggcgcatgctgctgagcaccataaacatcattgtccccgacgttgccggaaataatatcccgcggcatgacgatttttaccgcgttggccggatcgaaccagataatgcgatgaataaaatcaggctttacgttatataagccggcaataagctgcggggttaattgctcagaacgtttgacccgctgataatcttcccgggttttaaataaaatatctaaaaccagttcatacggtccggcgtttttggagcggatcacctgcgccagtgagcatagggattgtttcatgcctgaactccttctggcgtcacctgttcgatatggaagtcaaagcgcagcgcgtcgctggcttcgatcaggtgatagattgagaactcatacaccggaccgctctgaatatcggaaggcgagaacgggaaggcgaggttgcccgcggtggcaatgcggttttcatagccgtagtgcagcagggtagagcgcaccagcgaacagacgctgttggcgatatcctgggttggcgcaacgacatcaagcaggatgcccagttcgtgcccggcggttttcatcggttcgtgattgcccatcacgccgttctttccatacagatggaaggtcatgcggatgctgtcatcgttcagggagaggttgcgtgcgacgctggtctgtacctcttcaagaatattatcgattccggcaatcatgatcggatcgcgcgttccggcaatggtcaggcagcggaaaccgacccgccgcgcgccttccagcttcagcgcgtacggcgtcgcttcatgacgagaaccgctgacgtaaacctcgccttcgttgacggctttgaaggtgcatcctttcaggttcagcacgccgcccggaccgggcaggaaatacggatcggacttctcgtacagcgtatgcgccgccgcagaggtttcggtaaacttacgctttggattaaacgctttcagcgtaaagccgctgtcgtcgataatccccatggcgcagtcggaaccggagcccggcgtggcggcaatggccgcgcattcgaggatcttgccgcagtgcagggcgagcccctcgtcaaagccctgcataatcggcagcgccgcgaagcaggccggatcgtacgcccggccgccaagcaccacctgggcgccggctgccagcgcccgctgaaagggttcgatccccatctgggcgacgatataggtactctcttcaatggcctcgtgggtcagttcaggcacaaagtccagggcggtgattttgccgttatccagcgcctgatgaacgatggctttatcgacatcagacgggatcagcgccatggagaacgacagtttttcttcctgcgcaatctcatggataatctgccgacaccactccagatgcggcgcggcgccggatcctccagcggtaccgatcaccaccggaatgttgttcttcacgccggcgacgatcatatagcgcagatcgcgtttcaccccggcccggtcggtaaaaggtttgcctgcccccagatagtgggggccgggatcggatgaaccggcgtcaacggcaatcagatccggcgatgcctccatagctttacgaaagctctcttccgggaagccatagccgaggattgccgtcggcgataagatcttaaaggtacgagccatctcttaatccttagtctgcaacagcgcgatggtgcggttcatttcgttaaacacgatgttaagaccttcgtcgaagcccatgcccggcttgatcagcatgcgcatcggacgcgcggccagcgcgacgtgaacgcaggtgcgggcgctgatctcggtttcgttacaggtaccgccctgataggcttccatcgcgtgtttgttgcagtacagcaccgcgtccacgatgttatgaatgccgccgagatccggggttttgatctgcaccatgtggcagctgccggcatcggtaaagtcaacgatgtcctgataggtgttacaccactcgtcggcgacaatttttacgccggaaccgaggcgggtcagctctttggtgatggccgtgagcatacggatctggtccggtttattacccgcatccaccgggccttctatgtagagcggcaggccctgcgcctcttgctccaggctggcgatatagtcggcgcagcgaaccggatccatattgaaaatcaggccgatggtgccgtacacgtcgatatgcagcgtggggcgatagcgggggctggtgcgcaggcttaagatgcggtcggatagccagcggacatactcacgcagtttttcccctttgagacccagcttctcttcgacgttgttaatgagcgcatgcggcaggacgtcaacgcctttgaggatcattttgtccacggcgatgtagcggtcgtcgccgctctgaccaaataacggaatcgcttccggtatgcagggcagctgccattcgtcgcaaaccacctccgccttcaggcggccgctggccagcgcggtggcgtcgagcagcgcctgggaaagaccgtagcggacggcggtatgcagcagatgaccgtcgatgcgcagcttgtcgaagaagcgggcgttcggcaggaaggtatcgacatcgcggccctccagcagcggtttgatatgatcgttgaggaacgggataaagttctccgccaggaacagcgggtcgcggccgcccgcgccggagtactgtacggcggcacagtcaccgaccgccaccgcgccgttttccagaatcagctggacggatacgcattcacccgcctggcgtaccgaggtgaagcctggcgttaccggagcaccggtataaatgaacccatcatgacccgcgccgtttttaatcgcctgctgatcgtcaaaatagaatgaagagtagccagcggtgaaaagggcctgtttaattttcattatggtcttcctattaatttactgtgggataccgcgttgatgtcatcaacaaccatctggaatgagggtttgcgtccttcaaaatgcgcacgttcagcgacgtaatcgtggtgcagggcgaggatgtccttcggcagcggaaccgcgccggcttcaagcacgcgaatggcgccggcattgtcgcgaaccggcaaaattttgcccgcgttgcaggatgcgggggcaaaaggcacgtccaggacgcccgcttcaaaggccagcaccgtaccgcgggcgatgtcgccgttgcccagctcgaacactttcttcagcaccgcgcgaacctcgctttttatcagctccacttcctgctcaaccgcggcgcagggcgggaacttctgatcgctgaccatattgagcatctggcgggatgccctcagcccctgcgcgttggccgccgcggtgggaataccgaacgcttcatgcgggctcttggtgatcactttggtggcgccggacatcccggctaccgccgcgccccaggagataatggcaaaggcttttgattcatcttccggaaagccgcccatccactggtggaagacggtactcagctcgtaatcgtcgaatccataattgccaaagtattcgtgggagagttcgcgaagagatttaatcgccgcgatgtcctgggtgaggctgccgacctggccgtagccgacggtgattgacttgacgccctgttccagcgccagcagaccttcgataatggccaccgcgtgggacataaacggtgggatcagggtgccggtcagcgggccgaacggttcgcggttaatacgaatgccgtgttcttcatacaggcccatcaggcggtcgcagtactgccagtcgcgaatcgacttctccagggtgacgcgcttggcgtagggaatgttgtaggagataccgccgccttcgtagctggtaaagccgctggccatggagatttccgccagcaggcgcgcgtctggcgtaccgtgacgtacctggaccggtttttccagcgcttcggtcatccggcggcaggcggcgacgccgtggttaaccaccggcaaaccattcagtttggaggttcccgcctcgatggatttctgtatgccgaccgccgcttcttcgtaacggttgaggcgggtataggcatcgatggtgctgggcagcagatcgcactcttcctgcagggttttgagcagcgcaatatgttcatccatcagcgccacgcccgcgcgcggctggctcagggttttaccctcctggtcggccttaagcagagcgtgagaaaagcgttttttctcaggaatggtttgctggtacttcacgccatcttcgaagtgctcaacgtccttgccggtatgccaggtctgcaatacctgatgccgctcggtcatgaattcgtcgtgggttaattttttatttcgaagttccattcgtagctgccttcatttatagggttaaacagtgaatgctggtgcgagcggcgagctcggggtagagcctggcaacgtttgccagcagcggaagcaggccttttgcatcgcggtaataatcaaaccgggttggcaggagaatgcgtctgccgtcgtcatccagttcgcggtatttcagccagcggtggatgtcgaagccgctggcgcgggagagccatccaccggaaccgacgactttacgcacgggggtcagatcgcggcccatctgtaaatcgacgttgcccacgcaggtgcagacctgctttttggtgcccgcgtggcgttcgctggcgtagccgacgcacagcccggccagcacggtgtcgaaatatttttcttcctcgttgagcggcagataatccggctgagcgaccagatggcgcaggtagcggtaaaaggcctcctgacgctgcggctggtgggcaaacaccacgttcaccagctcctgagtactttcaccgaccacgacagctgaaacgcgcatgccgagatcgccttctaccgtacgtttaacaaacggttccggaaccccgtgcagaacggtatccggagagagcgtgttggcgctggcggagtagacgtcggtggtggcgccgcccatatcgatcagcatgaactctttccacgcgctgtcgtaatggctgatggtttttaccagctcgtagacggtccacggcgttggcatcggctcttcgccggtttccgcgacaatcacgtccagccctttacctttgacgattcgggataagaagacatcgcaaatcgccttgcgggcagcgtagggattagggtgatcgagatcgggcagaatgttgtctaccgtggtcaaatctttgtggccaaggatggcctgaacctcgtcctgaatatcccggtttccggcatagataatggcgcagtcgagcgttgactccgccagcgcatgggcgttggccaggccgtagctctcctcgccgccgtcggttccgccggtaaatagcaggatatccggcggcgtggcttccagcgcctggatatcgtggcggttgagtttgtaggcgtagtattgggcgattttggcccccgccgagtgggcggtgacttttgctgattccagggtgatggacggcaccagacccatcgcggcaacggcaagaccgccttttgccgatgaagagtatttcagcgtgacgtcaccgcggtgcagcaacgggcgcgcatcggcaacgttaagcacccggttcaggctggcaaaaaagccttccgccaggtgatgggtagtggtcggggtcagaacgtgatttaccagcgtcagctcatccccctcctgtgcgaagagggccgctttggtccacgtcgagccgatatcgacagagacggtttgcatcagatagcctcttccagacactgctgttcaacgccgtggcgctggttgatatcgttcgccatcagcctgcagacgtcttccagatcgtggcttggggcaaagacgcgattgaagcccatctctttgaatttggcctcgacgtcggcaaaatcatgcttaccgaccaccaggttaccgccaacgtaaagaagaatatcgccgataccgcgttcgatgcagcgttcgcgcagtcccaggcagtcgatatcgccgtggccgtaaatagacgacacaacgatggcgtccgcgccggtttcgatagcggcatcgatatattcatcctgactgaccatcacccccagattgattacgcgaaaatcatgggcagtaaaaacgcggtccaggactttgttgcctactgcatggcagtcagcaccaatgacgccaataacaagtgttgatttcttcatgggtaatcctctgtaaggctgatggtataaaaataaaaacgactttctaatatttgcagcgttgatgatggccgcctgttaatagggctggagtgtctgtggttcgaaggggggaagcaattgatctattttcagaatatctttcaaaaaagtcttgtttttgatttttctttaaaaaatccttttctatcatatagttgttgatttcttattgtctgggggttatttctgtttagatctttttaataaatagattgcgatgtttgtgagcaaggtcttattttatattttgcctttgataataagcggtaaatacaattctttaaatttttctgtgaacatagtaacggaatttatgtgcggttttttatatgcgtcacggcaaatttgttagattaaagatataaaatgatgatttgtttatttaatatttcatttttgttgaatggcggagtggggcaggagagctgctttccggggtggataaaagcgtagggggaaagtctgctgcataaagagcagggtgcgttgcgtcacaaaacgacaagaaagagaatgtacgccgcatttacttgataatgagatagttacgcatctgtgttaattgaaagtaaacgcaatgataaatgtaataagcaaaaaatttagggcattaacttgataaaaaaaatctgtgagctacacgacattgtcagctgatgcccggattaatgcgcccagcgctcatcccattaaattcccctccgcggcgaaataaatggactatcattttcagtaaccgttgatactcttgaaaaacatattgttaacctagtgtttacctgtacggtacacggtatacataattaacatttaaaatgaaaattgatttaaatcaatgtttaaaacttggaaaaggtcgcgaaatggagttaaattgtcgcggatcaaattgaccgaaatctggtattttcgctataaattgatcgctgtcgaaaactgcaaatttatcacaataaaaacctatttattgtaagggttttgcagcgtaatataatcacgggatcaatttgggtgttttgttaacatgtttgtaacttctcattactatcgttttcttgcatgagaaaacgggcgtgacgagaagaagcaaataaatttgtattggggcatgcgtgtgaccctttctaacggggttcactctcggagtcttcatgcgatgagcaaggagtcatgatgttagatatagtcgaactgtcgcgcttacagtttgccttgaccgcgatgtaccacttcctgtttgtgccgctgacgctaggtatggcgttcctgctggccatcatggaaacggtctacgtcctttccggcaaacagatttataaagatatgaccaagttctggggcaagttgtttggtatcaacttcgcgctgggtgtggcaaccggtctgaccatggagttccagttcgggactaactggtcttactactctcactatgtgggcgatatcttcggtgcgccgctggccattgaaggtttgatggccttcttcctcgaatctacctttgtcggtctgttcttcttcggttgggatcgtctgggcaaagttcagcacatggccgtgacctggctggtggcgctgggctccaacctgtcggcgctgtggatcctcgtcgctaacggctggatgcagaacccgattgcgtcggacttcaactttgaaaccatgcgtatggagatggtcagcttctctgagctggtcctgaacccggttgctcaggttaagttcgttcataccgtggcgtcaggctacgtgaccggcgcgatgttcattcttgccatcagctcctggtatatgctcaaaggccgcgacttcgcttttgccaagcgctccttcgctatcgcagccagcttcggtatggcggcgattctctccgttatcgttctcggtgatgaatccggctacgaaatgggcgacgtgcagaaaaccaaactggcggctatcgaagctgaatgggaaactcagcctgctccggcggcctttaccctgtttggtattcccgatcagaaggcgcaggagaaccgcttcgcgattcaaattccttacgcgctgggcatcattgcgactcgatccgtggataaacaggttaccggcctgaaagacctcatggttcagcacgaagagcgtatccgtaacgggatgaaagcttacgcgctgctggaacagctgcgtgccggttcaaccgaccaggccgtgcgcgatcgctttaacgacgtgaagaaagatctgggctacggtctgctgctgaaacgctataccgacaacgtctctgacgcgacggaagagcagattgctctggcgaccaaggactctattcctgccgtggcgccgctctacttcgccttccgtattatggtagcgtgcggcgtgctgatgctgttgattatcggcgcctccttctggagcgtgattcgcaaccgcatcggtgagaaaaaatggctgctgcgcgccgcgttctatggcctgccgctgccgtggattgccgttgaatcgggctggtttgtcgccgaatatggccgtcagccgtgggctattggtgaggtgctgccgacggccgtcgcgaactcgtcgctgaccgcgggcgacctgatcttctctatggtgctgatttgtggcctgtacacgctgttcctggtggctgaactgttcctcatgttcaagtttgcccgtaaaggaccaagcagcctgaaaaccggtcgctaccactttgaacagtcctctgcggctattcagtcggcacgctaagacaggagtcgtcaaatgatcgattatgaagtattgcgttttatctggtggctgctgatcggcattttgcttattggttttgccgtcgccgatggcttcgacatgggggtggggatgctcacccgtttcctcggtcgtaacgacaccgagcgtcgaattatgattaacgccattgccccgcactgggacggaaaccaggtgtggctgatcaccgccggcggcgcgctgtttgccgcctggccgatggtttacgccgccgcgttttccggcttctatgtggccatgatcctggtgctggcgtctttattcttccgtccggtgggtttcgactaccgctcgaagattgaggacaaccgctggcgtaacatgtgggactggggcatcttcgttggcagcttcgtgccgccgctggtgattggcgtggcgttcggcaacctgctgcagggcgttccgttccacgttgatgaatatctgcgcctgtactacaccggtaacttcttccagttgctgaatccgtttggcctgctggccggtattgttagcgtggcgatgatcctgacgcagggcgcgacctacctgcagatgcgtaccgtgggtgaactgcacctgcgcacccgctccgtgtctacggtggcggcgctggtgacgctggtctgcttcgcgctggcgggcgtttgggtctactacggtatcgacggttatgtggtgaaatcggtgatggatcataccggcccgtctaacccgctgaccaaagaagtcgcgcgtgaagccggcgcgtggatggtgaactttaataacatgccggcgctgtgggcgattcctgctctgggcgtggcgctgccgctgttgaccgtcatctcgacaaaagcggataaaggcgcatgggcgtttctgttctcctcgctgacgctggcgtgcatcattctgactgccggtatcgccatgttcccgttcattatgccatcaagcacggcgatgaacgcgagcctgaccatgtgggatgcgacctccagccagctgacgctgaacctgatgacttacgtggcgattgtcttcgtaccgattattctggcctacaccgcctggtgttactggaaaatgttcggtcgcatcactcgcgaagacatcgaaaagaacacccactcgctgtactaaggtaaggagctatatatgtggtatttcgcatggattttgggaacgcttcttgcctgtgcttttggggtgattaccgcgctggcgcttgagcacgtggaagccaccaaagcaggtaaagaagaacactgatgagtattatcgtgatgcgatatacgaaatcattcgggttgcatcgaggcggcaagtctgtgaatccccaggagcttacacaagtaagtgactggggtcagcagacgtagccaacaaagaggcgacgtgaatgataaagtatatgtatgcgataatggacaagcgcccgttaagggcgctttccttattgatggcgctggcgctagcgggctgtatcttttgggatccgtcgcgctttgcggccaaaaccagcgagctggaaatctggcacggcttcctgctgatgtgggcggtttgtaccggcgttatccacggcgtgggcttccgcccgcgcgccattcactggcagggaattttttgtccgcttatcgctgatattgtgctcgttttgggcctgttctttttcttcttttgaataagaaatctctgttaaccatatgggcttgcataagcccataaaaatttactcctcgtttactttcccccattccaaaccacgattcccgcgcgtatagtagcgaagtttgaaagcactaaccttttgttgcattaccgggatgtaaagtgaatacaacgctgtttcgatggccggttcgggtctattacgaagacaccgacgccggtggtgtggtttaccacgccagctacgtcgctttctatgaaagagcacgcacagagatgctgcgccatcatcacttcagccaacaggttttgctggctgaacgagttgcctttgtggttcgcaaaatgacgctggagtattttgcgcccgccagactcgacgacatgctcgaaatccagacggagataacctcaatgcgaggagctaccctggttttcacgcagcgaatcgtcaacgccgagaacgtcgttttgaatgaagctgaggttcttatcgtgtgcgttgatccactcttaatgaagcctcgtgcgcttcccaagtctattgtcgcggagtttaagcagtgactgagatgaatatccttgatttgttcctgaaggcgagccttctggttaaacttatcatgttgattttagtttgtttttccatcgcctcctgggccatcattattcagagaacgcgtatcctcaattcggcgtcacgtgaggccgaagcgtttgaagataagttctggtccggtatcgagctttctcgtttgtaccaggaaagccagggtcgtcgcgataatctgaccggttcggaacaaatcttctacagcggcttcaaagagtttgcgcgtctgcatcgtgcgaacagccatgcgccggaagcgattgtcgaaggagcgtcgcgcgccatgcgtatttcgatgaaccgcgagctggaaaccctggaaacccacatcccgttcctcggtacggtgggttctatcagcccatatatcggtctgtttggtaccgtatgggggatcatgcatgcctttatcgcgctgggcgcggtaaaacaggcgacgctgcaaatggtcgcgccgggtatcgcagaagcgctcatcgcgacggcaattggtctttttgccgctatcccggcggttatggcctataaccgtctgaaccagcgcgtgaacaaacttgagctgaactacgacaactttatggaagagttcaccgccattctgcaccgtcaggcgtttaccagcagcgaaagcaataaggggtaagccatggccagagcacgtggacgcggacgtcgcgaactgaagtccgagatcaacatcgttccgctgctggatgtcctgttggtgctgttgctgatctttatggcgacagcgccgatcattacgcagagcgtagaggtcgacctaccggacgcaacggagtcgcaggcggtgaaaagcaacgatgagccgccggtgatcgttgaagtctccggcgtcgggcagtacagcgtgaaagttggcccggaaacgttatcgcagctgccgccggaacaggttattgcggaagccaggcgtcgacttgaggcgaatgagaaaacggtgttcctgatcggcggtgctaaagaggtgccatacgatgagattattaaagcgcttaacctgttgcacagcgcaggggttaaatcggttggcttgatgaccaagccgatctaatcgctcgcaatatgcacgcccgccagcacgtcggctttgggacaacagcgtctcgtggccgacgtcatataacgggaacaggcgaacagtttttgggaaccgatagtgtcaaaggcaaccgaacaaaacgacaagcttaaacgagcgatcatagtatcagtcgcgctgcacatcgtattgatagcgctgctgatctggagttcgtttgacgagcatctggatgcttctgccgggggtggcggaggttcctctatcgatgcggtaatggtcgatccgggggcggttgtgaagaattatgaccgtcaacagcagcagcaggccagcgcccgccgcgccgccgagcagcgtgaaaagcaggctcagcagcaggcggaagagctacgtgaaaaacaggccgccgagcaggaacggctgaaacagctggaacaggatcgtctacaggcgcaggaagcggctaaagaggcgaaagaacagcagaaacaggcggaagaagccgcggcgaaagccgccgcagcggccaaagccaaagcggacgcacaggcgaaagaggcgcaggaagctgccgccaaagccaccgctgacgcgaaagcgaaggccgatgcgcaggcgaaagcagccgaagccgctgcggcgaaagcggcggcggatgcgaagaaacaggcggaagcagaagccgcgaaagcggccgcggacgcgcagaaaaaagccgaagccgatgcggcgaagaaagctcagcaggaagctgagaagaaagcgcagcagcaggcagagaaaaaagcgcagcaggaagcggcgaaacaggccgctgctgaaaaagctgccgccgaaaaagcggcagaaaaagccgccgcgcagaaagctgctgctgagaaagcggcagccgagaaagccgccgcagcggaaaaagccgccgctgagaaagccgcggcagccaaagctgcagcagcagagaaggccgccgcagacaaagcggcgaaagccgccgccgctaaggcagcagccgccaagaaagccgctgcggccaaagaggccaacggcgttgacgatctgctcggcgacctgagctccggtaagaatgcgccgaaaggtaataccagcggtagcgctgggggttcatctcctgctaaaggaagtaagcaggggcagggtggggcatcccaggctgagattaacagctatatttcacaggtgcaggctgcgattaaaggtcatctctatgactgggatacctacaaggggaaaacctgtactttacgtgtgaatctggctcaggatggaacgctgttaagtgtgaaatcggaaggcggcgatccggcgttctgtcagcaaatgctggccgcaacgagccggatgacgaagttccctaaaccgccgtcgcaggctgtttatgaaacattcaaaaatgcgccactggacttcaaacctcagtgatagttttccccgtttatgcggggaaaacaaacgtcggtaggcccagggttttggtagttttgtgtatttgagtttgttaacattctgctaaattatcgtgggcttttcgcctggataagggagatatgatgaagcaggcattacgagtagcatttggttttttaatgctgtgggcggcagtgctgcacgcagaagtacgcatcgagattacccaaggggtcgactcggcacgcccaatcggcgttgtgccgttccagtgggcggggcagggtgctgcgccggaagatgtgggcggtatcgtggcggctgacctgcgcaacagcggcaagtttaatccgctcgatcgctcgcgtctgcctcagcagccgggtagcgctcaggaagtacagccggcggcatggtctgcgctgggcgttgacgccgtcgtggttggtcaggtgacgcaaaaccctgacggttcctacaacgtggcgtatcagctggttgataccggcggcgcgccagggaccgtgcttgcgcagaactcctttaaagtcacgaaacagtatctgcgctatgccgcgcatgctgccagcgacgccgtatttgagaagctgaccggtattaagggcgccttccgtacccgtatcgcctacgtggtacagaccaacggcggccagttcccgtacgagctgcgcgtgtccgactacgatggctacaatcagttcctcgttcaccgttcaactcagccgctgatgtctccggcatggtctccggacggcgcgaagctggcctacgtgacctttgaaagcggacgctctgcgctggttgtgcagacgctggctaacggctccgttcgtcagattgcttcgttcccgcagcataacggcgcgccggcgttctcgccggacggcagcaaactggctttcgctctgtcgaaaaccggtagcctgaacctgtacgtgatggacctgggatctggccagattcgtcaggtgaccaacggtcgcagcaataacaccgaaccaagctggttcccggatagccagaacctggcctttacttccgaccaggccggtcgtccgcaggtgtataaagtcaatattaatggcggcacgccgcagcgtattacctgggaaggttcacaaaaccaggacgctgacgtgagcgctgatggtaaaactatggtaatggtaagctcggccggtggtcagcagcacattgccaaacaagatctggaagcgggtggtgtgcaggttctgtcatcaacgtttttagatgaaacgccaagtctggcacctaacggcactatggtaatctacagctcttctcaggggatgggatccgtgctgaatctggtttctacagatgggcgtttcaaagcgcgtcttccggcaactgatggacaggtaaaatcacctgcctggtcgccgtatctgtgataataaataattgattattaaaggaatcaaagaaatgcaactgaacaaagtgctgaaagggctgttgatcgctctgccggttatggcaatcgcggcgtgttcttctaacaagaacgccagcaacgaccagagcggtgaaggcatgctgggtgccggcactggtatggacggtaacgctaacggcggcaacatgtcttccgaagagcaggctcgtctgcagatgcaacagctgcagcagaacaatatcgtttacttcgatctggacaaatacgatatccgttctgacttcgctgcaatgctggacgcgcacgcaaacttcctgcgcagcaatccgtcctacaaagtgaccgtagaaggtcatgcggatgagcgtggtacgccggaatacaacatcgctctgggtgagcgtcgtgctaacgccgttaagatgtatctgcagggcaaaggtgtttctgctgaccagatctccatcgtttcttacggtaaagaaaaacctgcagtactgggccatgacgaagcggcttacgccaaaaaccgtcgcgccgtactggtttactaagagaattgcatgagcagtaacttcagacatcatctattgagtctgtcgttactggttggcatagcggccccctgggccgcttttgctcaggcgccaatcagtagtgtcggctcaggctcggtcgaagaccgcgtcactcaactcgagcgtatttccaatgcgcacagccagcttttaacccaactccagcaacaactctccgataatcagtccgatattgattccctgcgcggtcaaattcaggaaagccagtatcagctgaatcaggttgttgagcgccagaagcagatcctgctgcagatcgacggtctgagcagcggtggcggcgcagcgggagcgcaaacccagacgtcagcgggcgatcagggcgctgcggctagcgggacggcgccagcggcctcgtcaggcgccccggcgcagaccggtgatgccaataccgattacaacgcggctatcgcgctggtgaaggatccctctcgccaggacgatgcgatggcggctttccagaacttcgtcaaaaagtaccccgattcaacgtatcagccgaacgccaactactggctcggtcagctgaattacaacaagggtaaaaaggacgatgcggcgtactatttcgcttccgtggtgaaaaactaccctaaatccccgaaggcgcccgatgcgatgtttaaagtcggcgtgatcatgcaggacaaaggcgataccgcaaaagcgaaggcggtttaccagcaggtggtcagtaaatttcctggcaccgacggggccaaacaagcgcaaaaacgccttaacgcactcggatgattatggcatgaccagaaatcgcatcatttctggtcttgtcgcatgaatcctaagcagttaagcaatctttatctaaattgttgttgcgctgaattctgaaatcagtaatatatgccgccgttgccaagggatatcgaacaagcccaaagcggcgaaaatagtgggtcgttagctcagttggtagagcagttgacttttaatcaattggtcgcaggttcgaatcctgcacgacccaccaatcgttctggtggaacgcgatagtaaaacgtgaaggataacgttgcgtcagcaacggcccgtagggcgaggcgaagccgagtcatcctgcacgacccaccgttaaaagatgtatccagcgcagtatcgggtgattagctcagctgggagagcacctcccttacaaggagggggtcggcggttcgatcccgtcatcacccaccactcgggtcgttagctcagttggtagagcagttgacttttaatcaattggtcgcaggttcgaatcctgcacgacccaccaatttaacatcaaactcagatgttaagcgtgaaggataacgttgcgtcagccacggcccgtagggcgagcgaaagcgagtcatcctgcacgacccaccaatttcgaattggtgacgagtgaagaatattcaggcagtacccgagcgggtcgttagctcagttggtagagcagttgacttttaatcaattggtcgcaggttcgaatcctgcacgacccaccaatttaacatcgcagtcagatgttaagcgtgaaggataacgttgcgtcagcaacggcccgtagggcgagcgaaagcgagtcatcctgcacgacccatcatcctgaatcgttccagttagcagtaaacccgcaaggggtcgttagctcagttggtagagcagttgacttttaatcaattggtcgcaggttcgaatcctgcacgacccaccaatttaacatcaaactcagatgttaagcgtgaaggataacgttacgtcagcaacggcccgtagggcgagcgaagcgagtcatcctgcacgacccaccaatgtaaaaaagcgccctaaaggcgcttttttgctatctgccatttcctcgaaaatcacaacaatccgcaataccttaatactgcgttattctaccgtcgcgctgcgtttaccgtggctacaattggcacaggccagcagcccggacagatgcgtagcatcgcctccgggaaatgtgccgggcctgatgcctttgcgtggcttcgtcccgggggcggcgcttgacgcgccttgcccgggctacagattcgtgcgttctgcaggtttagcagcccggacagatgcgcagcatcgcctccgggaaatgtgacggcctgatgcctttgcgtggcttcattccgggggcggcgcttgacgcgccttgcccgggctacagattcgtgcgttctgcaggtttggcagcctggacagatgcgcagcatcgcctccgggaaatgctccctgtgggaaaaattcctcacgacattttctgcacaatcggctatcttgtttagcatataaaacaccatgaccggttaatacctttcttcaggcattattacggtctgaaagttaagccagtgaaacgagactgcaagatgagcgtaatgtttgacccggaagcggcgatttatccttttcctccgaagcccatgccgttaaaccgcgatgagaagcacttttatcgcgaaaaaattaaacgcctgctgcgcgagcgcgatgcggtgatggtggcccattactataccgaccccgaaattcagcagctggccgaagagaccggcggctgtatctccgattctctggagatggcgcgcttcggcgcccgacattctgcctcgacgctgttggtcgccggcgtgcgctttatgggagaaacggcgaaaattctcagcccggaaaaaaccatcctgatgcccacgctccacgcggagtgctcgctcgatctgggctgcccgatcgaggagtttagcgctttctgcgatgcgcatccggatcgtacggtcgtggtctacgccaatacttcagcggcggtaaaggcgcgcgccgactgggttgtgacgtcgagcatcgccgtggaactcattgagcatcttgatagcatgggtgaaaaaatcatctgggcgccggaccgccatttaggcagctatgtgcagaaacagaccggcgccgacgtactgtgctggcagggcgcctgcatcgttcatgatgaattcaaaactcaagcgctggcgagaatgcgggcgctttatccgcaggccgcggttctggttcacccggaatcaccgcaggcgattgtcgatatggctgacgcggtggggtcaaccagccagttgatcaatgccgctaaaacgctgccgcacaagcagctcatcgtcgccaccgaccgcggcattttctacaaaatgcagcaggcggtaccggaaaaagagctgctggaagcgcctacggcaggcgaaggggcaacctgtcgcagctgcgcccactgtccgtggatggcgatgaacggcctgcaggcgattgcggaagggctggaaaagggaggcgttgaacatgaaattcacgttgatgaacagctgcgaaccggggcgctggttccgctaaacagaatgctcgattttgcggctacacttcggggatagctcattactgcgttacagaacgctctggggataagatggatttttttagtacgcagaacatattagtgcatatacccattggcgccgggggatatgacctgtcgtggattgaagcggtcggcaccgtcgcaggattgctgtgcatctggctggcgagcctggagaagattgccaactatgcctttgggctgatcaacgtcacgctgtttgccattatcttctttcagatccagctctacgccagccttctgctgcagatctttttcttcgcggccaacgtctacggctggtacgcctggtcacgacaaaccagcgataaccaggcggaactgcaaatccgctggctgccgctgccgaaagcgttaggctggctggcggcctgcgtggtggcgattggcctgatgacggtatttatcgatccggtttttgcgtttctcaccaggattgccgtcgcgctgatgcacaccctgggcctgcaggttgctatgccggcgctgcagccagacgcgttcccgttctgggactcctgcatgatggttctctcggttgcggcgatgatcctgatgacgcgcaaatacgtcgaaaactggctgctgtgggtgattatcaacgtcatcagcgtggttattttcgccctgcagggcgtttatgcgatgtcgctcgaatatctgctgctgaccttcatcgccctcaacggcagccgtatgtggattaacagcgcgcgtgagcgcggctctcacgcgttttcccgctaatggtgatgatggtgtccatgcccggcgtgcgtcatgttcagacggcactccgggccgctgcagggctgatactccatctgaaccgtaatgtgttcaatttcatacttatgctgtaagaagccctggattcgttcaagcaggccgtcgtgatcgtgcggcggtaccacctgcacgtgcagcgtcatcaccgttttttctccaaccagccacgcatgaacgtggtgtacgtcgcgaacttccggtatcgagcggcgcaaatcgcgctttaaggcgtcgacgtcaagcgaacgcggcgcgccctccagcagctcattaacgctctcctgcagcaaacgccatgcgctgcgcagaaccaggcacgataccagcacggacagaataggatcgataggcgtccagccggtggtgatgatcacgattgcggcaataatggccccaaccgaaccgagtagatcccccagcacatgcagagcggcggcccgcacgttgaggttacgctcttcactgccgcgatggaggatccagaaggccagaatattggccagcaggccggcaacggcgatgatcatcatggttttaccggctaccggttgcggatgatgaaaacgctgaatggcctcccagacgattaatatcgtaatgaccaccagggcgatagcattgagaaaggccgccagcgtggtcagccgcagccagccaaaggtgtgttgagcattaggcgggcgactggcgaaacgcacggccagaaaggcgaacagcagcgctgcggcgtccgtcagcatatgcccggcatcggccagcagcgccagcgaacctgaaatgagtccgcctgcaacctcaaccaacatgaatccggccgtgacgcagaacgccagcagcagccgacgggcattattatcttcggtggattgcggagaattatgcgagtgtgattgccccatggtgccatccctacattattattttgatgattactttatgacatgattcacctcttggggtgaataaaatgaaaaaaggagagccttagctctccttccgggcggataccgcgcagattattgggtggtaccgtcggttttcgtcgcctcgtcctggccgacctttttatcggtatccgggcagcggccatctttgcacattgagtttttgtggacttcatcgctcgacatcccgtcgtggttcatggtcgagccgttggggtggagcatggtgccgccggtatcggtggaaccggcgttaatgttaccgttgtccacgttgtttggcgccacgttttcacgcgcgtcgggggcgacctgacccgcgtcggctgccgaattggcctgcccgttgttcgactgcgcgccggtatcggcggccagcgccgcgccgctggccaggcccagggttgctgcgaggagaagactggttagcttgttcattttcattggatgctcctgttatatcgatttaccgaattacctcttccaacagtgcattgccggaggttctactcgttgtagttaaagcttcgctgttagcgatcggcattaatatataatgctgaatgctaaagaaaattaagttctaacagttaaaaattatagcttgtggccactattccgcgactttatggcgttttttagcctatttccaggaatattctgccgctactgtaaaatcacgtttacactttttgagcgaagagatagattggagggattgcatttaactagataagtatggcaacgctggaaataagatgaattatcagaacgacgatttacgcattaaagagatcaacgaattattacctcccgttgcgctcctggaaaaattccccgctaccgaaaacgccgccaacaccgttgcgcatgcgcgcaaagcgatccaccagatcctgaaaggtcatgacgatcggctgctggtcgtgatcggtccatgctccattcacgatccggcggcggccaaagagtatgccgagcgtctgctcgcgcttcgcgaagaacttaaaggcgagctggaaatcgtgatgcgcgtgtattttgaaaaaccgcgcaccaccgtgggctggaaagggctgatcaacgatccgcatatggataacagcttccgcatcaacgatggtctgcggatcgcacgcaagctgctgcttgatattaacgacagcggactgccagcggccggggagttcctcgatatgatcaccccgcagtatcttgccgacctgatgagctggggcgcgattggcgcgcgtaccaccgagtcacaggtgcaccgcgaactctcttccggcctctcctgcccggtaggctttaaaaacggcacagatggcaccattaaagtcgctatcgacgccatcaatgccgccggcgcgccgcactgtttcctgtcggtgaccaaatggggacattcggcgattgtgaacaccagcggcaatagcgattgccatattatcctgcgtggcggtaaagagccgaactacagcgcgcagcacgtggcagaagtgaaggtgggtctggcgaaagcaggcctgcccgctcagatcatgatcgatttcagccatgccaactccagcaaacagtttaaaaagcagatggatgtcggcacagacgtatgccagcaggttgccggcggcgagcgggcgattatgggcgtgatgatcgaaagccatctggtggaaggcaatcagagtctcgacagcggtgagccgctggcctacggtaaaagcattactgatgcctgtatcgggtgggaagataccgatacgctgcttcgccagctggcgaatgcggtaaaagcgcgccgcggttaggttttacggcgagtctcaaaataaaaaagcgtggagggctccacgctttttttacatcccgcgaaaattacttcgctttaccctggttcgctacggcagcggctttcgcggcgatctcgtcggcgttacccagatagtaatgtttaataggcttgaagttctcgtcgaactcatacaccagcggtacgccggtcgggatgttcagctcgaggatctctgcttcgcccatgttgtcgaggtatttcaccagcgcgcgcagggagttaccgtgagcggcgataatcacgcgctcaccgcttttcagacgcggcagaatggtttcattccagtacggtacgacgcggtcgatggtcagcgccaggctctcggtggtaggcagctcagcgtcggtcagttttgcatagcgcggatcgtgacccgggtagcgctcgtcgtctttggtcagctccggcggcgttaccgcaaagccgcgacgccactgcttaacctgctcgtcaccgtatttttcagcggtttccgctttgttgaggccctgcagcgcaccgtagtgacgctcgttcagtttccatgacttttctaccggcagccaggcctgatccagttcgtccagcacgttccacagggtgtggatggcacgtttcagcacagaggtataagcaaagtcgaagctgaagccttcttctttcagcagcttaccggccgcttttgcttcacccacgcctttttcagacaggtcaacgtcataccaaccggtgaaacggttttcgttgttccattggctttcgccgtgacgaacgagtaccagcttagttacagccatacacttactcctcaatacacgtcatctttctcgccgctttgatgcgacccgaaatctgtagtgtgtatatttattgattgataactattctcattatattgccgcgacttacctcacggcaatgcttatccctaaccatagcgaaaatagtcgctcagtgtaaggtgcttgtaaaacagaggttatgtttttgtctgtaagtggcgtatttttcagcgaaaggataaaaaaagccctccatcaggagggctggatattatttcgcaataaactgatattccgtcaggctgacgtactcttcgccggggcgcagtacgcaatccggctgcggccattccggatggttcggtgaatccggcaggaactcgctctccagagccagaccttgccagtcagcgtaaggctgcgcggtgcgcgacggcgtgccggccaaatagttgccggagtagaactgcagcgccggagcggaggtatagaccgtcatctgcagcttttcgtcctgcgaccagacgtgagccgccgggcttttggcatcgcccagcgcctggagcagaaaggcgtggtcgtaacctttgaccttttgctggtcttcatcgcgcaggaaatcgtccgccagcatcttcggcgtgcggaaatcgaagctggtcagggtgacgttttgcaaatcgcctcccggaataccgtcgctctcaacgggcagatacgcatcggcaaagatttgcagcctatggctacgcacgtcgctctgcacgccatcaagattgaaatagacgtggttggtcaggtttaccgggcagggctgatcaacggtggcgcgatactcgatggcgatacgattatcgtcggtcaggcggtagtgcgccgtagccgtcagattgccggggaacccctgatcgccatcgtgggaggagagtgaaaacagcgcgtgacgatcgtcggcgctgacaatctgccagcggcgcttatcaaatccttcaggaccgccgtgcagctgatggccggcctcgttggagggcgtcagattaacgctatggccatcaagggaaaagcggctgttggcgatacggttcgcgtaacggcctacggaagcgccgagataggcggcctggcgcgtatagtcgccaggggtcgcgcagccgagcagcgcttcgcgtacgctgccgtcggccagcgtcacgcgcgcggagagcagcgtcgcgccccagtccattacggtgaccgtcatgcctgcgtcgttacgcagggtgaggagattccacggctggccgtccggcgccagctccgttgttgggtttagcattgtccagctccctgcgacggtttgcagacgtaaaaggtctctttgataccggttttcgcttcatactctttggcaacggcctgctgtacggtctcgaccagatcttccggcaccagggcgacgatacagccgccgaaaccgccgccggtcatgcggacgccgcctttatcgccgatggtcgccttgacgatgtccaccagggtatcaatctgcgggacggtgatttcaaaatcatcgcgcatggaggcgtgggattccgccatcagctcgcccatccgcagcagatcgcctttttccagcgccgcggcggcttctacggtgcgggcgttttcagtcagcacgtggcgaacgcgtttggcgaccaccgggtcaagctcgtgggcgacggcgttgaactcttgcaacgtgacgtcgcgcagggccggctgctggaagaaacgcgcgccggtttcacactgttcgcggcgagtgttgtattcgctgccgaccagagtgcgcttaaagttactgttaataatcaccaccgcgacgcctttcggcatcgagaccgctttggtccccaaggagcggcagtcgatcagcagcgcgtgatcttttttaccgagcgcggagatcagctggtccataatgccgcagttgcagccgacgaactggttttccgcttcctggccgttcagcgcgatttgcgcgccgtcgagcggcagatggtacagctgctggaacacggtgccgacggcgacttccagcgaagccgaagagcttaaccccgcgccctgcggcacgttgccgctgatgaccagatccgcgccgccgaaagcgttattccgctgctggagatgcttcaccacgccgcggacatagtttgaccactgctgggcatcgtggctggtaatcggcgagtcgagagagaattcatcggtctgattgtcgtaatcggcggcaatcacccgcacggtacgatcgtcgcgcggcgcacaggcgatgaccgtctggtaatcaatggcgcagggcagcacgaacccatcgttatagtcggtatgctcgccgatcaggttaacgcggccaggggcctggataacatggctggccggatagccaaatttctcagcaaacagggcttgggttttctctttcagactcatggttatactccggattcgcgaaaatggacgtcgctcacagcgcgcagacgttcggcggcctgctcggccgtcaggtcacgctgggtttcagccagcatttcatagccgaccataaatttacgcaccgtcgcggagcgcagcagcggcggataaaaatgcgcgtgcagctgccagtgatcattctcttcatcgttaaacggcgcgccgtgccagcccatagagtaggggaatgagcactgaaacagattgtcgtaacggctggtcagctttttcagcgccagtgcgaggtcgctgcgctggtcatcggttaaatcagtcaggcgctgtacgtgcgctttcggcaacagcagcgtctcgaagggccacgctgcccagtaagggaccaccgcgagccagtgttcggtctcgacgacggtgcggctaccgtcggctaattcgcgctgcgcgtaatccaccagcatcggcgcgccgtgctcggtgaagtacgctttttgcagacgatcttcgcgttccgcctcgttaggcagaaagctgtttgcccacacctgaccatgcggatgtgggttggagcagcccattgccgcgcctttattttcaaagacctgcacccacgggtaggtttttccgaggtcggcggtctgctcctgccacgttttaaccacgccttccagcgcctccacgctcagttccggcagcgttttgctgtggtctggcgagaagcagatgacccggctggtaccgcgggcgctctgacagcgcataagcgggtcgtcgctttccggggcgtcaggggtatcggtcatcaaagccgcaaagtcattggtaaaaacaaacgtaccggtgtagttcgggtttttgtcgccggtgacgcgggtattacccgggcacaggaaacagtccgggtcgtgcgcgggcaaggtctgttttgccggcgtttcctgcgccccctgccaggggcgcttggcgcgatgcggagaaaccagaatccactgcccgattaacgggttataacgacgatgtggatggtcgacggggttaaatacgctcatgaaggttccttagtcgggataaccctgcggatgacgggactgccagtgccaggtgtcctgcgccatttcgtcaaggttgcgcgtcacgcgccagttcagctcgcgatcggccttttcagcgtccgcccagtaggccgggaggtcgccttcgcggcgcggtgcgaagtggtagttaatcggtttgccgcaggctttgctaaatgcgttgaccacgtcgagcacgctgctgccgacgcctgcgccaaggttatagatatgcacgccggctttatcggccagtttttccatcgccgcgacgtggccgtctgccaggtccatcacgtgaatgtagtcgcgtacgccggtgccatcttcggttgggtagtcgttgccgaataccgccagcgattcacgacggccaaccgcgacctgcgcgatatacggcatcaggttgttcggaataccctgcggatcttcccccatatcgcccgacggatgcgcgccgaccggattgaagtagcgcagcagcgcgatgctccagtccggctgcgctttttgcaggtcggtcaggatctgctcaaccatcagcttgcttttaccgtaagggctctgaggcgtaccggtcgggaagctttcgacgtaagggattttgggctggtcgccgtagacggtcgcggaggagctgaaaataaagtttttcacgcccgcggcgcgcatggcggaaacgagtttcagtgtgccggttacgttgttgtcgtagtactccagcggcttagcgacggattccccgacggctttcaggccggcgaaatggatcaccgcttcaatggcgtgatcgtggagaatttccgtcatcagcgcttcgttacgaatgtcgccttcgacaaaggtggcgcttttcccgccgagacgttcaatgattggcaatacgctgcgcttactgttgcagagattgtcgagaataatcacttcgtgtccctgcagtagcagttgaacgcaggtgtgacttccaatgtaaccgctaccacctgtaaccagtactttcatgattcgctccaataggcttatcgtgtgagaagaagatagcataccaaagaagccaaaagtgtgacacaggccaaattggtggaatcgtttacactaaaatttttaaacagcccatttgagtttttttgttttaaaaacagggtgatgttatgtctggtagctattattctgaaaaaaacagggatcagcagacccctgtacaggcttaattttacagcggatccagctggtaagtgtaaccgtctccactactcacaaaggccagtcggtgggtgatacagtccggggcgtcttcggcgtgatgagagacaaacagcagctgcgtcgccccttcgccaatcagcacatcaacgaagcggcgcaccagctggcggttgagcgggtccagcccctgcagcggttcgtcaaggatcagcagagtggggtgtttgaccagggcgcggacgatcagcgccagccgctgctgcccccaggagaggctatggaacggcgcatcggcggtgcgtttgtcgatacccagaatatccagccagttctgcaccagcttatgctgcttgtcggaaacggcctgatagatgccgattgagtcgaagtagccggagagaatcacgttacgcacgttggtgctgacgcggtattcaaggtgcaggctgctgctgacgtagccaatatgctttttgatatcccagatggtttcaccgctgccgcggcggcggccaaacagggtcaggtcgttgctgtatccctgaggatggtcgccggcgatcaggctgagcagcgtggatttaccggcgccgttggggccgactatctgccagtgttcgccagggttcaccgtccagctcaggcggttaataatcggacgatcgttgtacgaaactatgccgtcgttcagcacgatgagcggcgcttcggcgtccagcgcaagacgcgctgccggtgcgtcgggctccggcagcgtcatgccgtcaagcttttcgctatgcgcgagctgggcaataagcgcctgctgcagcagggcctgcttttcgccggtttcgctcagcacgcagtccgccagtaccccggcatactgaacgaacgccgggatctcgtcaaaacgattgaggaccagcaccagggtgataccttccccgttcagcgcggccaacatcccggcgagctgctggcgcgaggcgacatcaagaccgtcgaacggctcatcaagaataagcaggtcgggatcgcccatcagcgcctggcacagcagggtcttgcgcgtttcgccggttgagagatatttaaaacggcgttcgagcaggtggctaattgcaaactgttcagcaaggcgggcgcagcgggaggggtctttaaactcatcctggataatttccgccgtcgtgcggccggtgtcttcttctcccgggctgagcaaatcggtgttattgcgctgccactcatcgctgaccagcttttgcagctgctcaaaagagagacgggtgatgcgcgagaaggtgcactcacgctgcccgcttagcagggtcagctcgccggagagcgcccgcgcaagcgccgatttcccgctgccgttgctgccgacgaaagcccagctctcgccagcctgcacgcggaggtgttcaatatttaacgtttttgtatcgctaagacgaaacgtgccttgcgaaatttgcaacaatgacattgtgtatcccactttttgcagcgatttgcttcagggatacgtcttcgcgagcgcaatgtcaatgccgttagcacaacgtggcaagaatgatgcgatcggcattaaaatatgctatcacctccgccccttccgccagatcgcgcgtctgttccaccggcagggtggcgcaaaggctctgcccatccgggagcgccatcagcacttcacactgttccggcccgcgttcgatgtggttgatacgtccggccagctggttgtcggcccgttccgcctgtgcggcatcctgagtaatgccaacccacggcgctttcagcagcactagtacttcctggccttcctcaaggcccagacgatcggcgctttgggcggtaatcgcgaccttaaagcgggtttggccgtcggccagcagaacgtcaacgtgctgctggacctgctgatggtcgcggccggtaatggtgccgaaccactggttgcgcgcgctggtctgcagagagaatcgcgaaatggcagccagcaggctgtcgaggggaagggcgtcatcatcgctcaggacatcgaacgctttctgctgaatctgcgccagcaggtcgtagagctgaatcagccgctgcccgtagcgggtgaggaccgcgccgccgccgcctttgccgccggtcgcccggtcaaccagggtctgctcgctgagctgattcatttcattaatcgcatcccaggcgcttttatagctaatgcccgcgttttttgccccctggctaatcgagccggtctgttcaatctgtttcagcagggcgatacggcgaggatcggcgaacaggcgctgctgtaatttgagggtaagaagaatttcagcctgcataatcatatcctgatgaaaaagggtattgtgaccgatagcggtcatcttgcaagatgcatctctcacggtggccagcggggcaccgcacaaatggggcgtgtttttccggctgaattggttacaataaactattcgtactttctggagccaaccatgttagagctattgaaaagtctggtttttgccgtagtcatggtccctgtggtgatggcggtcattctgggcctgatttacgggctgggcgaagtgtttaacctcttctccggagccggtcataaagacagcagaccgcaaaatcactgatttcccccgcgcccggttctgccgggcgttcttatttcttcccccctccatttttcgaacgctgattacccctaattttcgctgggaaaaacctggcgctatcgttatattgtctactacataacgaactgacgggagattcagatgacaggtcaatggttacgcttttttgccggagcaacgttaacgctctccattgcgggccacgcgctggcggaagagggcaaagtgacggtttttgccgcggcatcgctcaccaacgccatgcaggatatcgccaaagagtataaaaaagagaagggcgtggaggtggtttcttcatttgcctcttcatcgaccctggcacggcagattgaagcgggggcgccggcggatctgtttatctccgccgatcaaaaatggatggattacgcggtcgagaaaaagagcattgataccgcctcgcgcgcgacccttctcggtaacagcctggttgtcgtggcgccaaaagccagcgcgcagggcgagataaacatcagtgataaaaccgactggaccagcctgctgaagggcggccgcctggccgtaggtgacccggaacacgtgccggctggcatctatgcgaaagaggcgctgcaaaagctgggagcctgggaaaccctgtcgccgaagctggcgccggcagaagacgtgcgcggcgcgctggccctggttgaacgcagcgaagcgccgctggggatcgtttacggctccgatgcggtcgccagcaagggagtaaaagttgtcggtaccttcccggaagattcgcataagaaagtggaatatcctctggcaatcgtcgacggccataaaaatgccacggtcagcgcgttttatgactatttaaaagggccggaagcgtccgctatctttaaacgttacggatttactacccactaatgttcttaagcgatcctgaatggcaggcggtactgctgagcctgaaagtctcctccctggcggtggtactgagcttgccttttggcatctttttctcctggctgctggtgcgacgagattttcccggtaaagcgctgctcgatagcattctccacctgccgctggtactgccaccggtggtggtagggtatctcttgctgatcgcgatggggcgacgcggttttatcggcagctggctgtatgactggtttggtctgagcttcgcgtttagctggcgcggcgcggtactggcggcggcggtgatgtcctttccactgatggtgcgggccattcgcctcgcgctggaaggggtggacattaagctcgagcaggcggcgcgtaccctcggcgctggccgctggcgggtgtttttcactattacgttaccgttgacgctacccggcattatcgttggcaccgtgctggctttcgcccgctcgctgggcgagttcggcgccaccatcacgtttgtttccaatattcccggcgaaacgcgcaccatcccttcggccatgtataccctgatccagacccccgggggagaaggcgcggccgcgcgtttatgcttgatttcgattgcgctggcgctggtatcgctgctgatttccgaatggctggcccgcctcagccgtcagcggatggggaaataaacatgcttgagctcgattttacccagacgctgggtacccactgtctgcaaatttgcgagacgcttcccgccagcggcattacggcagtgttcggcgtctccggcgcgggtaaaacctcgctgattaacgccattagcggcctgacgcgcccgcagcaggggcgcatcgtcctcaacggcagagtgctgaacgacgttgataaaggtatctgcctggcgccggaaaagcgccgcattggctacgtttttcaggacgcgcgcctgtttccgcactataaagtgcgcggcaatctgcaatatggcatggctaagtctatggcggcgcagtttgacaagctggtggcgctgctcggcattgcgccgctgcttgaccgcctgccgggcggcctctccggtggggagaagcagcgggtggcgattggccgggcgctgcttaccgcgccggagctgctgctgctggatgagccgctggcatcgctggatattccgcgcaagcgcgagctgttgccctatctgcagcgtctggcgcgtgaaatcaagatcccgatgctgtacgtcagccactctctggacgaaatccagcatctggcggataacgtgctggtgctggaagaggggaaagtgaaagcctttggctgtttggaagaggtgtggagcagcagcgtgatgcacccctggcttccccaggagcagcaaagcacgatcctgaacgtgaccgttgccgctcagcatccgcagtatgccatgaccgcgctggcgctgggggatcggcagatatgggttaaccgtcttgacaggccgcagggcgaaagcgcgcggatccgcattcaggcctcggacgtttctctggtactgcagcccgctcagcaaaccagtatccgcaatattttacccgcgcaggtcatgcagtgtattgaaagtcatgggcaggttgaggtcaggctggagataagcggccgtaccctttgggcgcgcatcagcccctgggcgcgcgatgagctgggggtgaccccgggccagcggctgtatgcgcagataaaaagcgtgtcgatagccgcctgattacagcaggtggcgatagatgtagtcggcgatgctggtggtttcgttttcaccgatcaccacgttggcgcgcgctttgacctcctccaccgcgttgcccatcgccacgccggtaccggcggcttccagcatgctgaggtcgttatagttgtcgccgaaggcgataacatcctgcatcgacaggccctgcgacgcgacccactgcgccaggcgtttgcctttgctgttgccttcccgggcaatgtccacctgatcgtgccacgaccattcgcactccagacccagcgtctggccaacgtgttgggcaaagcgctgcagtttggcggtatcttcatcggtcagggcgaatttccacacggcgttaacttcgcgggccgcctgcgccagagaatcgacctgagtgaataccggacgctgctcgacgggcagcgactgcgcccagctggcggtgcggataacgtgcccggtcggctgctcgtacagcatggcgtcatcgacgtacatcaggccgtgaatatcatgctcgttcagcatttccgtcaggctcagggctttatctaccggcatcgggtcggattcaagcaccttttttgcatgataatcatacaaataagtgccattgcagcaaattgcaggtgtatccagcgccagcgcctgataaaaaggatggatagcgacgtgatgtcggccggtgacgacgatgatctgatatcccgcgtctttggcgcgagccagcgcatcgagcgaggcggggaggatggtctttttgccggttaagagcgtgccgtctaaatcgagggcaatcacgcgtgaggtcatgggttgtttccggttaatgatgaaaagttagcaggctatgatggtacaccgctgtgccattccggcaaacttttcagcatctaccgctaaagagccgatacacttgatctttcaggctaccaggaggcaacctgaagagcgttgtgtatgcatattgtgtttttcagggtgtcgttagtctgaaaaatgaaatttccacgtgcagtgaggaaggagtattcatgaaacaaaccgtttataccgccagcccggaaagccagcagattcacgtctgggatctggatcttgaggggaaactgaccctggtgcaggttgttgatgccccgggccaggtgcagccgatggtggtgagcccgaacaaagagtttctctacgtcggcgtgcgtccggagtttcgcgtactggcctaccgcattgcgcccgataatggcgccctgactttcgccggtgaagccgcgctgccgggtagcccaacgcatatttctaccgatcgtcaggggcgctttgtgttcagcgcttcctataacgcgggctgcgtgagcgttacgccgctggtggacggcctgccgcgagaagcggtggcggtggttgaaggtctggaaggctgccactcggcaaatatctctccggataatcgcaccctgtgggtaccggcgctgaagcaggatcgtatctgcctgtttaccctgagcgacgacggtttcctcgcagagcaggagccggctgaagtgaccaccgttgaaggcgcgggcccgcgtcacatggtgttccatccgaatcagcaatacggctactgcgtcaacgaactgaacagctccgttgacgtctgggagctgaaagatccgtacggaaaaatcgaatgcgtgcagacgctggacatgatgccgcctgattttgccggcgtgcgctgggcggcggatatccatctgaccccggatggccgtcatctctacgcctgcgatcgtaccgccagcattatcactatcttcagcgtctcggaagacggcagcgtgctgtccatcgaaggctatcagaataccgagacccagccgcgcggctttaacctcgatcatagcggcaaatatctgatcgccgccggtcagaaatcgcatcatatcgcggtgtatgaaatcaaaggcgagcagggactgctccaggaaaaagggcgctatgccgtaggccagggcccgatgtgggtcgtggtcaacgctcgctaagttctctgtcagtgacgaaacctcgccgcggcgaggtttttttacgcctgcgcaggggctacttcacccgcatacgatactcaatcatgccgcttttctccgcgacccagttatacagacgctggccccgaaggttggtctcatgcgtgtgccagtacaggctggctgcgtgacgtttgcgcgcctgcagctgaacatactcaatcagctgtttgccgatatgctgaccgcgaacggccgggtcaacgaagaggtcctccagatagcagtagtcgctttcggcccaggtggagcggtggaagagataatgtacgaaacccactatcctgccttcctgttttgccactgcgcagaacatcggttcggcgggatggaaaaagcgcttccaggtgagctgcgtgatggtttccgggatgtcgacgcgataaaacgtctggtagcttttccacagcggcagccactgggcaaagtcgctttcagccgcggggtggagggttacctgcgcgaggttaacgtcggttttgttgctattcatggctgttccttatttttatcaaccggatggtttgacctggcgctatggtaggtgctgttctggttcctaaaaagtgacactttctgtatatttataggatccacttttatgccgtcgatgcccgctgccgctcatgccaaaacccattgcccctctgtttcaggaactgttattagcccgcggcgtgattaaagatcaggtctaccacgccctgcgtcaggcgattctggatggccgattgtcggcgggttcaaaaatcccctccagccgggcgttggctgagatgatggcgatctcgcgaaactcggttattgccggttttgaccgcctgatggatgaggggtacctggtcacgcgcaagggggcgggcacctttgtctgcgagcatatcccggataacctcattagcgagtatgacgcgtcgacgccgcccgaaacggcaatagccgccgcagggccgcttaatcctgaggtcgccgcactggtgtcatcatggtcagaaagagaggacagcggcgaaatgcgtcaggtttttgccgtcggtatcggctgtaccgatctcttccctcatgctttatgggggcggctgctggggcgcgtctggcggcaatcgcgtcgtgagctgggagcgcacgccacgccctatggatatcaacctctacgccaggcgattagtcgctatattcaggcgacgcgcggcgtcaattgccacgaagatcgggtgatcattgtcaacggtattcagcaagcgctttccatcaccgctcaggctttactggaaaagggcgatgaggtctggctcgacgatcccggatacaacggcgcccgcggcgcattcgccgccaggggagcggtggtccggcccgttcgggttgacgaggagggcatggatattcaggatggcattcgccattacccgcaagctaagctggtctataccgcgccgtcgcaccagttcccgctcagtggaacgcttagcctgcccagaaggctcgccttactggaatgggcggaagcccatcgggcgtggatatttgaagacgattacaatagcgaattccgctatgccgcccgctctctgcaggcgttgcaggggttagataatcatcagcgggtcatctacgcgggcacattttctaagatgatgtatccggagttccggctgggctttttagtggtccccgagcatttgcgtgaacagtttgccatgacgaaatattacaccgatctctgtagtggatatctcgaacaggccgtcctggcccgtttcatcagcgaggggcactatgccagccacgtccgtcgtattcgcaaagcctgttttgagcgaaaaagcgcgctggaggcggcgattgcacgctactttgccgggcgcatggtcgtacatccaacggattcgggtattcacatagtctgctggctatcagcgggtttaaaggcagaagaggtcgtcgctaaggcgcgccagcaaggtttcggcgtgcagacgtttgagcgctattgtcagcggccgatgtcgcgcgaaggagttttattcggttttgcaaaccataccccagcggtgttgaccgagggaattcgccgcctggctgcgatgttttagctcagcaatacgggaaatattttgcaggggattaatggcattcattgccgggttatattgcagacaaagattatctttttggaaaacctgccccgtcctgattattcatctgacaataggggcagcgttttaaaaagagagataccgcgcctggatttaaagtatatccacggcttctgtaataatataaccattcgcttagcgatatgtgacttccctgtttaattacagccggttaataaatcagatatcatccatggtgtagctgacgacgatttccagggttttgcggataacgtctgcagttacgacatcgctggtggtttccagcgccgtaattaaccacaaaataatcgccttgttgctgagatgaccctcagactcaaggatgctgctgatagccagcgacatcaccgctgattcatcgatcagtctgtcgcctgcgttgcggaaatattcagagagtgcggtatcgttcaggcctgcgtaaatatccggttgctgatgcatagtctgtctcatcatattctctactttgtaagttaaacattagaccagtagtggtcagtgtattttattcgtacctggctgctgaggggaacctaataacgaattcggctcatcccaattatgcttagcgcctgaagtatccacggtattgttttttccacggcgagctaccatattactgatttcatcgataatacgcccaattgcattccgccgctttttatcctgttccccagcctgcatggcctggagtttcccgatcagtgcttgtttactaataggccccttatttttgagtagagagaggacagcctctccaatcaataaatcggttagtggatcataatcattgcgattcataacggtatctctgatcattgtcatctccttgactgggaatttagtagcaagccggtaatccgtgtcagatactggcccatcccttatatttcctcattcagtaacgacttaaatcaccagatagctgaagccacttttatcactgatgctcaaacaagagaccaatcaacgtttgataatggttttcttcttcaggttctgaagccacttcaaggcgacccagcagtttcgtacacagggatttgcgattcaggttgcgtccttcattaaggatatccattacaatctgccctaacgtctcctgctgcgaaggtaacgacgctttattgaagtagtgggcaatagcgttagccgtgtcaggaatgtaaccgttctgctgcatatgtgctcctgtcagttcaattatcagtgaagttgcgattaaagttatacaatgtttatcaacttgtacatagaaaatggaaaaaatatgttaattttcttaatgtttttcgtaacatattgatttgtatggttttaaaattgtacaaatcttaaggtaaacatcgagtggagatgtacgagttgtacaggtatgcaggaaggcaagaacgccagcgaaaagagggtgttaatgtgatttatttgttaatgactcgggctcttttacaggacttatgcgggtagacctgctactgtaatatcttattggctttcatctcttctgtcggaaacttcatgctcactaccatcatttatcgcagccatatctgcgacaacgtgtcaattaaatcgctcgaaagcatggttgctgaagcaaatgtcaagaatagtcaggaaaacgtgtcgggtattctgctttttaacggcacccacttttttcagctattagaaggacctgaagagaaggtcgaggaaatttaccgccgtatctgcgcagacccgcggcaccataacctcgtggagctgctcagggatcatggaccgatgcggcgctttggtaaaattggcatggaactctttgatttacgagagtttgaccgcgatgaagtgctgcaggctgtgctggataaagggaccacaaaatatcagctcacctatgacgacagagcgctccattttttccgtaccttcgtcgaagccacggaaaaggaaaactattacgaaattcctgcggctgaaagctgggagtttgtgatagaagacgctgcctgctaccctgaaactccgctgcaagaggccgaatgcagctttgcttttcagccggtcatcgatccgtttgccaaagaggtcgtctcctacgaagcgctgctgcgcacgacttccggtgattcgccagcggtctattttgacggactttcgcgagaggaaatctactggacggatctccacagcaagcgcattgccttcgccatggcgggacttttgcacctccgtggacgcacgttgtcgattaatctgctgcccatgacgctggtgaatgttcccaacgctgtcgaatttctgttagcggaaattgaagccagcggtttgatccctgagcaaattattgtggaatttaccgaaagcgaagccatttcccgtcttgatgaattcaccgattccgtgcgtaagctcaagtctgcgggaattcgcgtggctatcgatcattttggcgccgggtttgccgggctattgctgctggctcagtttcagccggaccgcatcaagattaatcgccagctggttaaagatatccataagcacggcccaaaacaggcaatcgttcaggcgattattaaatgctgtcactccctggaaatcgccatttctgcggtaggtatcgagcaggcggaggagtggatgtggctggagtcagcggggattacgcatttccagggaaatttatttgccagtccgtgtctgggaggcattccgccggtagcatggccagagaaaaaagtagcgtgtgagcttctttaaattttgaccccggctcagcgcagcgtgtcggttaaaaagcggtgtataacggtaaaataagccctgttttttgcccggtatatcggcgcccgacctgtttattttagctgtacaagaaaagttaattgtacaaccaggctaaattcgttaatttagtcggtaaagtattatcaggttagagggcgctaatggcatattacagcatcggtgaggttgccgaacgttgcggaatcaaccccgtgactttgcgtgcatggcagcgaagatatggtttgctaaagccgcagagaagcgagggaggccaccgccagtttgacgaggaggacgttcagcgcattgaggaaatcaaacgctggatcgatcgcggggtctccgtgggcaaggttaaggcgcttctggaaggccatcaacctgaaacgcaagacgctgccgtcctgctccaggaagagatgatgacgcttctgcgaggtgtccagccctcaaaattacgcacccgcatcatgtccctcagccatgaatatcccgtagataaactgattgaccggctctttgtccccgtccgcagtaagctcaatctcgatccgaatacctccatggcgattatcagtatgctggacggtatcctgattgattgcgtagcgtccattcttgcggaatcgcgcaaaaaggtggggaaagagacgctgttggtggggtggggtaatgaagaccgtacccgtctgtggctggaagcgtggcgtttatcgcagcgcgcctggcacgtcaacgtgctggcggagccgctggattctcctcgcccggaactgtttcctggtcagcacatttttgtctggaccggccgcgcgctgacccccttgcaggcagaattacttagccactggcaaagccagggcttcaccattgagtttcacggagagtaagcgtcttagagggttagcagcggaacatttttagagatgttattccgccgcttgtcttcctgaagcatggcaacatgcgctggcaggtaaattatcagaaattgagctgggtccaggctttaaacgtttcgctgcggctaatattaaaaaaatctgtccgacccgagcagccgagctttttgattaaggtcaggcgaatttgataaattgttttaatatgtaaattcagcgacttccctatatttgccatcgcttcaccatcgttcatcaggcgaatcacttctttttcgcgattggtaaaaacgatactttcagattcccggtccggcttcttaccgaacaaggtggggcggagaataaacgattttatctcagcgggcgttgagcgcgccgggattctgtacattggtatttcgctcaggaagttcaaatcattaccgtcggtgagcaggacaaaacgaactcttttgcgatcgtaatgatgattaagcaccgcataatagttatcgctggtgaaaaacacatattttccatgaaaacagcctggtgataatgaatcgagtacaagctgtaatccttgacgaagaaggttattgttaatccaaagatcgtaatgattaaaaaagtgaccttgcttgtcgttattcatttgtcctccgaggtagaaatgttaataatggcttaatttaacaaatcacatatcatgcttagtgatggtttttaccacgtagcacatgcagcgtttggatatataaatcggcgagtatttcatttttctcgagattcaggcgccgctgaacctcaacgattaaacgctcatggctaacggcttcgctctccgtctgggtctgcaccatgtgttcgatatttttcagcaaagcagagttagaaataaactctgcaggaatagtatttttaatctgcatggtatatctcgggttatgttagacaataaatcaacaaacaaagatgcgggataaaaatcatctttgctctacggttctttaccatttcaaaggaaatggtgtgcattttttaaaatcataagaatgctgtaatgcagaatttaaaacttacgtaataactatagtcacgatcttcaggatgtacaatttttccgaattaattttgtacatttagttggtttttttaacattggcttataacatattgttttgtatagttattttttgtaaagataatgtgaaaaagttgtacaggacggcgtctgtacagggataacctacaggatgaggggatagcggtgaagaagcgggaagggcacagcgggaagagaaagagacaaagggggaatagcttcccccttttggcgtaagcgttactgcttcggttcagcgacgacaaagcttcccacgccgcggttgttgtattcccacatgcggttgaagttagcgtcattcaggttacgctgcgggttgcctttggcatccgcagtaccggtgttgccgctaaacggacggtttgaaccgacggcatcagcccacggtttggcaatattaaagccttcattaatgacgctatcgcgaataacgacctggccattggtgttgccgtcaacgtccagagagcggcccagctgcgcgacgttatcgccggaagcggtaaagcggctgttgatcgccaggaagccgtaggtcacgctcttcagggtcgctggcgcaaagacgtagccctctttctgggtgcgcgaattgaccacacggaagtcggtattatcgaacacgaccgccccacgaccggaaacgatatcgacgtcgccttcaatatagctgttgctgaccagggttcgggtctgacggttatcctgcaggcggttttgtacgccgctgttggtcacgaaaaaggtgttctggcgaccgaggatattcaccttgttaatctgtacccgatcgccatcgctacgcagcgccacggcctgatgggtgcccgcgtctacgctgtcgccgaggttgttggcgatagtcaggttctgtagctggagatcgttattctgcgaccagaataccgctgagcacatcacgccaacggtggcggcacgtctgctctggcagctgtcgtacatataccaggccggtttgcccggcatatatttgccgcccggattaacctggtgacgccaggagaccggatccatttctgaatcaatcgctgcgctgatttttacatcaatcggcttctcaccggtgccgtacagggtcagcgcgccaggcgccgccggaacgtatacggtgcccgcatattcacccggcatgatggcgataaactgacgacgattggagtggcgggtaatcgctgcatccaccgcggcctgaatcgtggtgtgggttaccccctgggtacccgcaggacccacgacaaaatccggctgcgccgggaggctgatggcggacgggctccacgcagcggcgttaggatcgagagactggaaatagctcgctggtaagaagtttttcgcctcatcggcggttaaaactggacgagaggccgtgcccggcgctgtttgcgttgagggctgttgatcggcaggcgtcgaactacaggcggacaacgtcacgccaaaggccagcgccagcgccaggcgggaaacggaatatgtgttcatgttgctccgggcaagaataaattaagggtataggtcctttaaagcctgctgttttataccaacttaagcgaaacgggaagacgtagcgcaaaaaagttgcttctttacataataagagccgggaaggggccgcttttgatcacaaataaataacatttgccgggggctgagttgacatttctcgcagaatcaaaataaatgtctatacaacccatgacaagttgaccgctatgacacacacaccttccgaacgcctaatctggcgaaacgtccgcctggccacgctcgatccgcgtttctctcagccgtatggactcgtggagcatcatgcgctgctggtgcgcgatggacgcattgaagccattgtgcccgaaagcgaggcgcccgcagggcaaagtattgacctcggcggcaggctgctcacgccggggctgattgattgccacacgcacctggtcttcggcggcagccgggcgcaggagtgggagcagcgcctcaacggcgtctcctaccagaccattagcgccaacggcggcggcattaacgcgaccgtgcgcgccacccgggaaagcagcgaaacggagctgctggcgctggcccggcagcggctggctcgtctgctgcgcgaaggggtcaccaccctggagatcaagtccggctacgggctggatctcgcaaacgaacgtaaaatgctgcgggttgtacaacagcttgccgcaacgcataccgttgagatttcccccacgctactctccgcccacgccacgccgccggaatataaaggcgacccggacggctatatcaatctggtatgcgaaaccattctgcccacgctgtgggaagaggggctatttgaaagcgtcgatgccttctgcgaaaacgtcggctttacccccgcgcaaactgaacgggtttacagcacggcccaggcattaggtatcccggtaaaaggtcacgttgagcagctctcttcgctgggcggcgccgaattagtgagccgctataaaggcctgtccgccgaccatattgaatacctgaccccagagggcgtggcggcgatgagccgcagcggcaccgtggcggtgctcctgcccggcgcgttctatttccttaacgaaacccgcaggccgccggttgaactgctgcgcgaatatcaggttccgatggcggtggcgacggactacaaccccggcaccagccccttcgccagcctgcatctggcgatgaatatggcctgcgtgaaatttggcttaacgccggaggaggcgtgggcaggcgtaacccgtcatgcggctcaggcgctgggccgccaggcgagccacggtcagctggcgccgggcttcgttgctgattttgctatctgggacgcggagcatccggttgagatggtttacgagccggggcgcagcccgctctggcagcgcgtggtgcgaggagaaatcgcatgaagctatgacaaccgacggccgccgggatttggcagggacgcgaccacagcgcggaggcgcggcaaatcgcccattggtggcagtagcgattcagtatattctggacgtttcgccgcccattcgcacaaggaagcccggccatgttctcatcgcaacctcgttccgcgcctgcgcctttctatgaaaaggtgaaacaggctattagcgaaaagatccacagcggcgtctggcgtccacacgatcgcattccttcggaggcggagctggtggcgcagtttggctttagccggatgaccatcaatcgggcgctgcgcgagctgaccgatgaaggccggctggtgcgattacagggggtggggacgtttgttgcggagccgaaagggcagtcggcgctgtttgaagtgcgcagcatcgcggaggaaattacctctcgtcatcatcagcaccgctgcgaggtggtgctgctggaggaaacgcaggcggatctgattcaggccgcggcgctcaatgtggccgccggtacgcggattttccattcgctgatggtgcattttgaaaatgaggtaccggtacagattgaggaccgctgcgtcaacgccgccgtggtgccggactatctgcgtcaggactataccgcgaccacgccccacgactatctgtcgctgatcgcccctctgaccgaaggggagcacattgttgaggcggtgcaggcaacggcggaggagtgcgcgctgctgcatattcacgcgcacgacccgtgtctgctgatccgccgccgcacctggtccaccacccatatcgtttcccacgcgcgcctgattttccccggcagccgctaccgtctgcagggccattttggttcctgatcttcctgcgcgtcggcaaaacgtgattgctgacgcaatataacaaaaatgtatcttttgtgttaaatcctggcttgcgtatgcttgtatagacaagtatatgtatctacgtacacaacgttaattgtcaggagaaccccccgatgtcgcaaagcaaataccgccagcaggacgtacgtgcaccgcgtggcacaacgttaaatgcgaagagctggctgaccgaagctccgctgcgtatgctcatgaataacctcgacccggatgtcgccgaaaacccgcatgagctggtggtgtatggcggcatcggacgcgcggcgcgcaactgggaatgctatgacgctatcgtgaaggcgctgaaaaacctcgagagcgacgaaacgctgctggtgcagtccggtaagccggtgggcgtattcaaaacccatgaaaactcgccgcgggtgctgatcgccaactccaacctggtgccgcactgggcaacctgggaacactttaacgagctggatgccaaagggctggcgatgtacggccagatgaccgccggcagctggatctatattggcaggcagggcatcgtgcagggcacctatgaaaccttcgttgaggcaggccgccagcactaccagggcagcctgaaggggcgctgggtgttgaccgccggtctgggcggcatgggcggcgcgcagccgctggccgcgaccttagcgggcgcctgctcgttgaatatcgaatgccagcagagccgcatcgatttccgcctgcgtacccgctacgttgatgaacaggcgacgtcgctggatgacgcgctggcgcgcatcaaaaaatacaccgccgaaggccgggcaatctctatcgcactgtgcggcaacgcggcagagatcgtaccggaaatggtcaaacgcggcgtgcgcccggatatggtgaccgatcagaccagcgcccacgatccgctgcacggctatctgccgaaaggctggaactgggaagagtaccaggctaaggccgagtcggacccgcagggcactatcctggcggcgaaacgcgcaatggccgaccacgtgcaggcgatgctggcattccacgaaatgggcgtgccgacgtttgactacggcaacaacattcgccagatggcccaggagatgggcgttggcaacgcgtttgctttccctggcttcgttcccgcctatatccgcccgctattctgccgcggcatcggcccgttccgctgggttgccctgtccggcgacccgcaggacatctataaaaccgacgcgaaagtgaaagagatcgttaaagacgataagcacctgcatcactggctggatatggcccgcgagcgtatcagtttccaggggctaccggcacgtatctgctgggtaggcctcgaatggcggcagaagctggggctggcgtttaacgaaatggtgcgcagcggcgaagtctccgcaccgatcgtcattggccgcgaccatctggactccggctccgtcgccagcccgaaccgcgagacggaagcgatgcgcgatggttccgacgccgtctccgactggccgctgctcaacgccttactgaataccgccagcggggcgacctgggtgtcgctgcatcacggcggcggcgtcgggatgggcttttcgcagcactccggcatggttatcgtctgcgacggtaccgatgaagcggcggtgcgcattgcccgcgtcctgcacaacgacccggcgaccggcgtgatgcgtcatgccgacgcgggctacgatatcgcgattgagtgcgcgacagaacaaggtttgaatcttccgatggtggcagcaacgcaggggcacgctaaatgaacgctttaacactgattccgggtcaactcagcctgtcgcagctgcgcgacgtctacagccagccgctgaacattacgctagacgaaagcgcgttcgcggcgattgatgacagcgttgcctgcgtcaacgcgattctggcggaaggccgcaccgcctacggtatcaacaccggttttggcctgctggcgcagacgcgcatctcaaccgaagatctggaaaaccttcagcgatcgctggtgctgtcgcacgcggcggggattggcgaaccgctggatgatgacctcgcgcgtctgattatggtgctgaaaattaacagcctgtcgcgcggcttttccggcattcgcctgagcgtgattcaggcgctgattggcctggtcaacgcgggcgtgacgccgtggatcccggcgaagggatcggtcggcgcctccggcgacctcgcgccgctggcgcatatgtctttgaccctgcttggcgaagggaaagcgcgcgtgcgcggcggggagtggctgccggcgacggaagcgctgcgtcaggcggggcttgagccgattactctggcggcgaaagaggggctggcgctgctcaacggcacgcaggcgtcgacggcgtttgccctgcgcggcctgttcgaagccgaagacctgttcgcttccgcggtagtttgcgggtcgttaaccaccgaagcggcgctcggttcgcgtcgtccgtttgatccgcgcattcacgaagcgcgcggtcagcgcgggcagattgacgccgcggcgcactatcgccatctgctgaccgacgacagcgcgatttcccagtcgcaccataactgcaccaaggtgcaggatccgtactctctgcgctgccagccgcaggtgatgggtgcctgcctgacccagcttcgccaggcggcggaagtgctgctggttgaagccaacgcggtatccgataacccgctggtgttcgccagcgagaacgacgtgatttccggaggtaacttccacgccgaaccggtggcgatggcggcggataatatcgcgctggcgattgccgaaatcggatcgctgtcggagcgccgtatcgcgctgatgatggacagccatatgtcgcagctgccccctttcctggtcaaaaacggcggcgtcaactccgggtttatgattgcccaggtgacggcggcggcgctggccagcgagaacaaagcgctgtcgcacccgcacagcgtggacagtctgccaacctccgctaaccaggaagaccacgtctcgatggccccggccgccggccgccgcctgtgggcgatggcggaaaatacccgcggcgtactggccgttgagtggctggccgccgtgcagggtctggatatgcgcgaaggcctgagcagcagcccgctgctggaagaggcgcgccacctgctgcgcgaacgggtgacccattacaccgaggaccgcttcttcgccccggacatcgaaaacgccattgcgctcctggcggcgcgtcatctgacgcggctgctgcctgccgtgctctgagaccaacgctaaaccatcgctgttctctgtacctgcgccgggaggatctcttcctcccggccaccctacacgcatatttgtcgtcgtataaaaactatcaggacacttgcatatgcaacaacaaaacaagccacacctgctgcgcgggctgaatgcccggcacattcgttttatcgccctcggctccgccatcggtaccgggctgttctacggctcggcatcggcgatcaaggccgcgggcccggcggtactgctggcctatctgatcggcggcgcggcggtgtttatcgtgatgcgggcgctgggggaaatggcggtacgcaaccccgtttccggctccttcagcagctacgcgcgccagtatcttggcccgctggcgggttttattaccggctggacctacacctttgagatggtgatcgtcgccctcgcggacgttaccgcgttcggcatctatatggggctgtggtatcccgatgttccccgctggatctgggtgctgagcattatcttttttatcggcgccatgaacctgtgcagcgtgcgcgttttcggcgagatggagttctggctgtcgctgatcaaagtagtggcgattattgccatgattgtggcgggcggcagcatcattttctttggattcggtaacgcctttccggcaaccgggctggagaatttgtggagccacggcggctttgcccctaacggctgggaggggattatagcctcgctcggtatcgtgatgtttgcctttggcggcgtcgagattatcggcgtgaccgcggcggaagcgaagaatccgcagaaggtgatcccgcaggcgatcaatactatcccgctgcgaatcgtgctgttctatgtctgcaccctggcgattctgatggcgattttcccgtggaacagcttcggcgagcggggcagtccgttcgtgctgatttttgatggtctggggattccggcggcggctaccatcctgaatatcatcgtgatcagcgccagtatttcggcgattaacagcgatatttttggcgcggggcgcatgatgtacggcatggcgaaagaggggctggcgccgaagagcttccagcgcatcgccagcaacggggtgccgtggatgacggtggtggtgatgggcgtggcgctgctggcggcggtggtgctgaactacctgatgccggagcaggtgtttgtgctgattgcctcgctggcagcttttgctacggtgtgggtctggctgatgatcctgctggcccactttgcgatgcgtcgcggcctgtccgctgaagagcgcggcaatatcgcgttcccggtgccgttctggccggtggcgccgctgctgacgctgctgtttatgggactggtcatcgcggtgctggggatggtggaggagacgcggattgcgcttatcgccggtctggtatggctcgggctgctgacggcggtgtggtttgcgcgggtgcgcaaaaacgccgtgcaggcggtgacggagtcgtgattgttttggtttacccgggttgcggctgacgccttacccgggctacccaatcgcactcacctgtagcccggataaggcgtttacgccgccatccggggcttagctaaacagggcggtaatcgacgcgctgccgaggctgtggaaatggacgttaaagccgaccatcgcgccgctcgcgccctcatcgaccgcaattttttcgacgtccagcgcgtggacggtaaagatatagcgatgggtctcgccttttggcggcgccgcgccgccgtatccggcctggccaaaatcggtacgggtctgaatcgcctcttcgggcagttccgcctgtccggagccggctccctgcggtaacacgcgggtatcggccggaagattggccaccagccagtgccaccagccggagccggttggcgcatcgggatcgaagcaggtcaccacaaagcttttggttccggccggcacatcgtcccacgccagatgcggcgagatattatcgccatcgtagcccatgccgttaaagacatgacgattgggcagcttctcaccatcctgtaaatcatgactgattaatttcatcgtctctcctcgtagtcatccgctgattagccagaaagtgtagcgcgagagaggcgccattaccgtcgcttattcgctaaaaaatgtttcttcctgaaccgcggcgtttaccgcccgcgtcaggcggctcagctgctccggcgtaatgatgtacggcggcatcaggtaaatcaggcgaccgaacgggcggatccacacgccttgttcgacgaaaaagcgctgcagggcggccatattcaccggccgatgcgtctcgatcacgccaatcgctcccagcacccgcacatcggcaacctgcgcggattcgcgcgccggcgccagctcggcgctgagctgcgcttcaatggctgccacctgctgctgccattcgccgctttccagcaggcgcaggctctcggtcgccgccgcgcaggccagcgggttgcccataaaggtcgggccgtgcataaagcagccggcttccccgtcgctgatagtttccgccacctgacgggtggtgagggtggcggagagggtcatggtgccgccggtcagcgctttgccgaggcacagaatatccgccgcaatccccgcgtgctcgcaggcgaacagcttaccggttcgaccaaagccggtggcaatctcatcggcgatcagcaggataccctcgcgatcgcacatcctgcggatccgcctgagccactcggggtggtacatccgcattccgcccgcgccctgaacaatcggctcgaggatcaccgcggcgatttcatggcggtgggcggccatcagacgggcgaacggcaccatatcccgctcatcccagtcgccgtcgaagcggctctgcggcgccggggcgaagaggttatccggcaaatagccctgccacaggctgtgcattgagttcgtcggatcgcagaccgacatcgcgccgaaggtatcgccgtgatagccgttgcggaaggtgagaaagcgctggcgcgggtctcccttcgcctgccagtactgcagcgccattttcatcgccacttcgacggcgacggagccggaatcggcgaggaacacgcattcgaggctttccggggtcatcgccaccagctggcggcacagggcgaccgcggaagggtgggtaatcccaccgaacatgacgtgcgacatctggtcaatctgcgctttcatcgccgcgttcaggcgcgggtgattgtagccatgaatggccgcccaccaggacgacatgccgtcaaccagctgcccgccgtcggcgagggtcagctcacagccgtgggcggccacgaccggatagaccggcagcggcgaagtcattgaagtgtaagggtgccagatgtggcgccgatcgaaagcgaggtcgtccgttgtcataatcgacttgtaaaccattttgaaaacatttaggtttacgagtataaaccgaaccaacaattaacaaaaccctttggagaggctaatggctcaccacccccgctggacaatgtcgcaagttactgagttatttaataaaccctttctggatctgctgtttgaagcgcaacagatccatcgccagcacttcgacccgcgccaggttcaggtcagcacgctgctgtcgattaagaccggcgcctgcccggaagactgcaaatactgcccgcaaagcgcgcgctataaaaccggtctggaatccgaacgcctgatggaggttgaacaggtgcttgagtcggcgcgacaggcgaaacaagccggttcaacccgcttctgtatgggggcggcgtggaagaatccgaacgatcgcgatatgccgtatcttgagcagatggtgaaaggggtgaaagcgctagggctggaagcgtgcatgacccttggcacgctcaacgatagccaggcccagcgtctggccggcgccggtctggattactacaaccacaacctcgatacctcgccggaattctacggcaatatcatcaccacccgcacctatcaggagcgcctcgataccctcgataaagtgcgcgatgccggaattaaagtgtgctccggcggtattgtcgggctgggggaaacggtcaaagaccgcgccgggctgctgctacagctggccaatctgccgacgccgccggaaagcgtgccgattaacatgctggtgaaggtcaaaggcacgccgctggcggataacgacgacgtggacgcctttgattttattcgtactatcgccatcgcgcgcatcatgatgccgacctcgcacgtgcgcctctccgccggtcgtgaacagatgaacgaacagacccaggcgatgtgctttatggccggggcgaactcgattttctacggctgcaagctgctgaccacgccaaacccggaagaggacaaagacctgcagctgttccgcaagctggggattaatccgcagcagaccgaggtacttgaaggcgataacgcccagcagcagcggctggagcaggcgttgatgaacccggataccgaggaatattacaacgcggcggcgctatgagctggcagcaccgcatcgagctggcgctggcggaacggcaggcggcggatgccttgcgcagtcgcctgccggtgacgctgggcgcaggacgctggctcagccgcgaagggcggcgctggctcaatttttccagcaacgattatcttggcctcagccagcatccggctatcgtcaaggcctggcagcagggggcggatcgctacggcgtcggcagcggcggctccggccacgtcagcggctatagcgaggcgcaccgcgcgctggaggagcagctggccggctggctgggctatccgcgcgcgctgctgtttatttccggctttgccgcgaatcaggcggtgattgccgcgctggcgggcaaagaggatcggattgtcgccgaccgtctcagccacgcttcgctgctggaagccgccagcctaagcccggcgcagctgcggcgttttcagcacaacgacagccgccatcttgacgatttgctggcgaaaccgctatccggccagcagctggtggtgaccgaaggcatttttagcatggacggcgatagcgcgccgctggctgaggtttatcaggcggcgcgggcggccggcgcgcttctgctggttgacgacgcgcacggtatcggcgcgctcggcgaagaggggcgcggcagctgctacgcgcagcaggtacgcccggatctgcttatcgtcaccttcggtaaagcgtttggcgtcagcggcgcggcggtgctgtgcagcgaggcgctggcggattatctgctgcagtttgcccgccatctgatttacagcaccgccatgccgccggcgcaggcggtggcgcttagcgccgcgctggccgtgattcgcagcgacgagggtcagcagcggcgggaaacgctggccggccatatcgccgactttcgccggggaatgtcccactatcccggggagctcactgattccggcagcgcgatccaaccgctgatcgtcggcgacaacgcccgcgcgctgcggttggcggcgcgtctgcgtgaggaaggctgctgggcgacggctattcgcccgccgacggttcccgtcggcagcgcgcggctgcgcctgacgctgaccgccgcgcacgagtctgccgatatcgcccgcctgctggaggtgctgcatgacggcggtgaataagcgcgccgtcgcggcggcgtttggccgcgcggcgggacattacgctcagcacgacgaattacagcgtcttagcgcctcgctgctgctggaacagctcgatatcaagacctttcctgaggtgctggacgcgggctgcggccccggcagcataagccgcttctggcgcgatgcagggagccgggtgacggcgctggatctttccgtcgacatgctggcggaggcccgccgcggaaactgcgcgcaccgctacgtcgagggcgacatcgaagcgctgccgctggcggacggctgcgttgatctggcgtggagcaaccttgcggttcagtggtgcgacaatctcgcgaccgccattgatgagctgtcccgggtcgtgcggcccggcggccgcgtggcgtttagtacgctgctgtcaggttcgttacctgagctcattcaggcctggcaagccatcgatgagcggccgcacgccaaccgttttctcagcgagcaggcggtgcgtcaggcgctggccgaacgccgcgccagcggccacgtccacgccatcacgctgccgtttcccgacgcgctcagcgcgatgcgctcgcttaaaggcattggcgcgacccatctgcaccacggacgcagccctgcgccgctcagccgcggcaagctgcggcagctccagctcgcctggccgcagcagcagggccagtgcccgctgacgtatcatctttttacaggagttatcgaacgtgactaaacgtttcttcgttaccggcaccgacaccgaggtggggaaaaccgtcgccagctgcgcgctgctgcaggcggccaatcgcaagggatttaaaagcgctggctacaaaccggtggcttccggcagcgactgtacggcccagggattacgtaatgaggatgcgctggctttacagcgcaatagccgcgtggcgctgtgctacgagcaggtcaatccgttcacctttgctgaaccgacgtcaccgcatattatcagcgccgatgaagggagaccgattgacgccgccgcgatttctgctggactgcgcgagctggaagcgctgtccgactggctactggtggaaggggcggggggctggtttacgccgctgtcagaaacgctgacctttgccgattgggtacaggaagagcggctgccggtgattttagtggtcggcgttaagctggggtgcatcaaccatgccatgctgaccgctcaggcggtgctacaggccggactgccgctggcgggctggatagccaacgatatccagccgcccgccaggcgccaccctgaatatctggcaacgctgaaacgcgtgctgcccgcgccgtttcttggcgagatcccgtggctggtggaggcggctcagcgcgaggatctcggtcagtatctcgacctcagcgcgctggatcgggcgtcatccacttcgccagcagcggggcatccagctggataacgtcgccctgagctacgctgcgtccacagtgcagcagacagaaacgatccgccacccgacgaataaacggcaggtgctgttcggcgatcagcaccgtcaggccaatatcgcggttcaggcgcatcagtaaatccccgagcttgtgcaggaagcgctggccgccgccgcgcgaaggttcgtcgaggatcagcaggcgcggacgggttatcagcgccctggccagcgccagctggtactgatcgtcggcgctcagggtaatccctttactttggcgcagagcgtacagctcggggaacagatcgtaaatctctccggcgaccgctgacgccggttcgccgcccgccgcaagggcaatgtgcaaattttcctccacgctcagctgcgaaaagatccgtttatcctgcggtacatagccaatgccgatggcgctgcgagactgcgcggagagcggcatcaggtcatagggcgccgatcctccgtcctgccaggtgatagtgccgctggccaccggtagatgaccggtaatacagttgacgagcgtggttttccccattccctggcgccccatgacgcaagtgcatttaccgggtttgagctcaaggtcaacattccacagcgtgtgctggcttccgtaatagtggttcacggcgcgtagactcaacatagacgttttctcctttcctgggatagcaggcgacgagaagattctgcaaatctcttgccaggaaaaagaactctcggtatttgctggtcaatacaggtgcgaccgggcacaagcggaccgaccttgcactttcccggtgcccgcgcgctgaaatgtggtgcaaaaaataacaaaaaatctagccactcttcgccaataaacagcaaaaaaaattcaattaatttttttcgcggcgggtttggccggggcgacgggttttgttcgggtggctcgggtcatgggctgcagacagttatccactattcctgtggataaccttgtgtattagagttagaaaacttgcggtaagctagagagtacgcggcctgcggccgaattggcgcgaaacccgtcttttattaaattctattaaatatcaattatttaaataaaatcaatgcctgtaagaaaagtgtcaccgactgccataaaacattcatcccctcgcttgacaaatgttaaatggccatactttttggggataaccctgaagcgtggtcgattatcccgtaaagcggtttttattcgtccatgttggcggtaaaaagcgctatttagtccgactacgataatacggcactgtttttatatccagtattttttattggcaaaagctgagccggcgagtagaattaaacacctgccgttcaacccttcttcaggttctgattgatgagtaaaccgttcaagctgcattctgctttccgtccctccggcgatcagccggaagccattcgtcgcctggaagaggggctggaagatggcctggcgcatcaaaccctgctcggggtcaccggctcaggtaaaacgtttaccatcgccaacgtcattgctgacctgcagcgtccgacgatggtgctggcgccaaacaaaaccctggcggcgcagctatacggcgaaatgaaagagttcttcccggagaacgcggtggagtatttcgtctcgtactacgactactaccagccggaagcctacgtgccaagctcggacaccttcatcgagaaagatgcgtcggtgaacgaacatattgaacagatgcgtctgtcggcgaccaaagcgctgctggagcgtcgcgacgtggtggtggtggcctcggtctccgctatctacggtctgggcgatccggatctgtatctgaaaatgatgctgcatctgacggtcggcatgattatcgaccagcgcgctattttgcgccgcctggccgagctgcagtatacccgcaacgatcaggccttccagcgcggtaccttccgcgtgcgcggcgaggtgattgatatcttcccggcggagtctgacgatatcgcgctgcgcgttgagctgttcgatgaggaagttgagcgcctgtcgctgttcgatccgctgaccggtcatattgagtcgacgatcccgcgcttcaccgtttatcccaaaacccactacgtcaccccgcgcgagcgtatcgtccaggcgatggaagagattaaagttgaactgtcggagcggcgtaagcgattgctggagaacaacaagctgctggaagagcagcgtctgagccagcgtacgcagttcgacctcgaaatgatgaacgagctgggctactgctcggggattgaaaactactcgcgctatctgtcgggccgcgggccgggcgaaccgccgccgacgctgtttgactacctgccggccgatggtctgctggtcatcgatgagtcccacgtcacgatcccgcagatcggcggtatgtaccgcggggaccgggcgcgcaaagagacgctggtggagtacggtttccgcctgccgtcggcgctcgataaccgtccgctcaagtttgaagagtttgaggccctggcgccgcaaaccatctatgtttcggcgacgccgggagcctatgagctggataaatccggcgacgaggtggtggaccaggtcgtccgtcctacggggctgctggatccggtcatcgaagtgcgtccggtaggcacccaggtcgacgatctgctctcggaaattcgcatccgcaccgcgatcaacgagcgcgtgctggtcacgacgctgaccaaacgcatggcggaagatttaaccgaatatctggaagagcacggcgagcgggtgcgctacctacactcggacatcgacaccgtggagcgcatggagattatccgcgacctgcgcctcggcgagtttgacgtgctggtggggatcaacctgctgcgtgaaggtttggatatgccggaagtttcgctggtggcgatcctggatgccgataaagaaggcttcctgcgctctgaacgctcgctgattcagaccattggccgcgcggcgcgaaatatcaacggcaaagcgattctctacggcgataaaattaccccgtcgatggcgaaagcgatcggggaaaccgagcgccgccgcgagaagcagcaggcgtacaacgaagagcacggtatcgttccgcagggtctgaataagaaagtggtcgatattctggccctcggtcagaatatcgcgaaaaccaaaaccaaggggcgcggcaagtctcgctcaccggttgaggcggatgtcgtcgcgctaacgccgaaggcgctccagcagaagattcacgagctggaagggcagatgatgcagcacgcgcagaacctggagttcgaagaggcggcgcaaattcgcgaccagcttcaccagctgcgcgagctgtttatcgccgcttcgtagcggcgttgccagctaaatatcgcccgggccttaccgggtcttcgggcgatggacggaatgtgtttttcgtaggccgggtaagacgccagccgccacccgacagaaaagcgggcacatgagccaaaacgaggtggccagaacgctttggttatttgttgcccctctgtcgcgattttccgtgatgcttaatgttggcttaatcttgtttggcgaaactatcctcactttactgaggatagcgccatgcaaaaattaaccttccgcgaatacctggcagtcacctgcgcgtttgttatcgtcgttgcctttttccatcagtgggtgctgacgttctgacgcgaagctttagggaagagtacccaggcgcgaacgccgggcccgggctgtcggttatgtaaaaagaactgcgcgtcgtgcagctgagcgatgcgggtgacgatgcttaacccgagaccaataccgccatagcggctgtccatgcggacgaacgctttgcttaactcaccgcttttagcctcatcaattcccggtccttcatcctcaacggccagaatgggcgttgggccaggcgctatcgacactttaatcgtcgaccccgtcgggctataacgatgcgcgttttcgaccaggttacgtaaaataacctgcaccagcgtagcgtcgcccgacacgattgcctctccatccttaacgttgatcgccagcgtctgctggcgctgctgcagcattgtctcaagctcgctctgcagcggttcgattacatcctctttcagcgcaacctgctgatagcttccggcggagaatgactggccaacgcgcgccagctgaagcagctgggtaatgctattggtcatttgatcgagacgctgaattagcgggtccacgctaacgccatgcactttcgccagaagctccaggtgcagacgcagtccggccagcggcgtgcgcagctcatgggcgacatcggcggtaaacagacgctcgcgatcgagggttaaattcaggcgggacaccagctgattaatcgcggtggtcaccgcggtgacttcaggaaccgattccttcagcgtgataggctgcaggttgtccggggtgcgactttccagctcgagctgcagtctggaaagcggctttgtgatttttttcaccgccagcagggagatatacagcgccaggccgataatcagcaggcttgggatcagcaggctggctaccgcttcgcgaacctcatgctctatatgcttctgattgttatgcccttcaatggcgctggcgaccagcagctgaatctgctcctgactttcatgccacagccagaacacgctgatgagctgacaaacggccagaatagcgccaattgtcagcagcagccgatgacgcatagtccagttttcactgacaaaaaaagccatagcgttattcggtctccgcgttatcaaccagcatatagccaaagccccggacggtgcggatgcgtgatttgccgactttatcgcgcagattatggatatgcacctccagcgtattggtggccggttcgttgtcccagctgtaaatgtcgttgtagagaatttcgcgatgcaccgggctgcccgctttcatcatcaggcgtgaaagcagagcgtactctttgggcgttaaatccagggactgctcgccgagccagaccagccgccgggtgacgttcaggcgcagattgccgacggacagttcgttatcgccctgattattgtgacgacgcagcagggcgcgaatgcgcgcgttcagctcttccagcgcaaacggcttaaccaggtagtcatccgcgccggtatccaggccgctgatgcggtcatcaacggtatcgcgggcggtgaggatcagcaccggctggctgaacttctcccgtcgcatgcgcgccaggaagtgcagaccgtcttcatccggcaggccgaggtcgagaaccaccaggctgtagtggttgctggccagagagagggcggcttcgtgggcggttgatacgccgtcgcaaacgtagccttcgctttgcatcgccagaattaacccttgtaacaggagcgcatcgtcttcaatgactaaaattttcatcggcctgcctctctacatggcgttaaaatatcgtctgttgcctggtactcgcgggtgctgaccccgagcagaccgagcagggtggagaaaagattatcctgcgaatacgcttgcgttttcgctttttgctgcaaacactggctggacacgccatagcgctgttgataatccgctgacagccacagcagcatcgggacgtgtttttgcgtctccggggcgatggaccacggtagcccgtgtaaatacaccccatcctcgccaagcgactcgccgtgatccgagagatacaccaggctggtggtaaatttatcctgctttgactgcagtaattttatcgctttgtcgaccacataatcgacatacaaaatcgtattatcgtaggtattggtgagctgctgctgggtgcagctctgaatctcgttggtgtcgcaggtgggcgtaaactgtttaaactgcgccggataacgattgtagtaggttgggccgtggctgccgatagtgtgcagcacgataatcccgtcctgctgcagattatcgatatagttctccaggttatggaacagcacctcatcgtagcattctccgtcgatgcactggccgctaagcttgagatcggtgacgttctggtgcggtacccggtcgcaggctcctttacagccgccgtcgttatcattccactgaacctgaattcccgcgcgctgcaggatatccagcacgccttcctgatggtgcgccagctcttcatcatagtgggcccgcggcatattagagaacatgcacggtacagaaaccgcggtcgcggtgccgcaggacgtggtgtcggggaaatagatgacattatcctgtttcaggcgcgggttggtctcgcgggcgtagccgttcagggaaaagtttgccgcccttgaggtttcgcctaacaccacgatagtcaggtttttccgcggtccgctgcgcatctccggcttctgaaccgcgtcttcgccaattttgaccagcggaagattatccatcctgttatgcgcataccaggagttcacggccacaatgctgtttgacgggctcagggacttaaccagctctttgttattgcgaaacagcgaggcgtaatctttatagaaaaatgccgcgaccagaataatcagcagcgctgaaaccacgatgctcaacagccttaccgccacgctgcgccacagggttgccggtttgcggattttaacccaccaggccacgaccaccgccaggatgccggagagtcccaggatcaggaccatttttccggagagtagcgcaaagctttcggcgggagtggtatcgagaatattggtgatcatcgcccgatcgataatcacgccaaaggtccagataaaatactgggccgaggcgctaagcagaataaacaggctgataacgaggcggtcaagcttaagaaatgacgctagcgtggtgatgatattcatcacgctgatagccactatcggcatactgaggaacaccagccagttatgcaggccgttgaccggcagcagggtaaacgcctggcgatagaaagcaatgttcagcgccaggccaatatagcaggcgaacagaatcaaatagaccgtacggttaagcattggccgacgtaaagaaaataacgacatagcgaagtccacataaagagatgttcgctatgctgcccgttttttttaagacaaccttaagattttaagcctgcctgtttttgtcgcgaggataaggccgcgttgaggattagcctaaggcctgaatcgctttatccagcgcgcggcgcaacagctggcgatcgtgacgatagggcacatcgctggcgtccagaggcgtctgaatgacgacccgatccttaacccctgcgatatcggctttcgggccgacaaccagcgcgtcaatcacccgtttaccaatctgctgctccataatggcgaccctgtccgccagcgtcaggctggctgccgggctatgctctttgccgaggttatcgataaacaccattggcgcgggcgtgcggcgcagcgccttcgccatctcatcaagcagcagaatcggcatcaggctggtatagaagctgccggggccaatcaggattaaatcggcttcggcgatggcttctatcgcttcacgagtggtgggcaccggcggggagagcataagctcgcgcggcacgctggcaagctgatcgatattcacttcaccgtaaacttcgtgcccttcatggtcgatggccataagatcgaccggttgttccgacatcgggatcagaaacgcgtcgaccttaagaagattcctgatcaaattgatcgcttcaagcgggcgcacgctcaggtgatccagcgccttaagcatcaaattgccgaggttatgcccggaaagctcgccgttgccgctaaaacggtactcaaacatcgccgaggccacgctgggttcggcgatgagctgattaatacagttgcgcatatcgccccaggcgatgccgccttccgcgcgacgaatgcgccccgtagagccgccgttatcggtcgtggtgacgatgccggtgaggcgtgaaccgagcgaagagagggatgacattacccggcccagcccgtgcccgccgccgagtgccaccacgcgatccagatcggcgaaagtgcgattgcgcataaaaatcccttataaccatttatcgggctcacagtaaccgatctacccctaaaagacgatgggctgaatctgacaaactgaccgacatcaatgcaaaagcgtggtttttagctattctgtagcgaaaatacgcgatcgtatcgatatatacatgattatataacgaaactggaaatggcataaccgttattaaagcgctactattcggcgtaacccactaacactctagcctctgtgcctgtgtcgaaagatatggtgctttggccgtgacaacttcggttgccaccagggcgcgaaaagaaatgaccgcgtctcccgtatttggaaaggtgtctatggcttcacagcttaccgatgcatttgcgcggaagttttactatctgcgtttatcaattaccgacgtatgcaactttcgttgcacctactgtctccccgatggctataagcccggcgccgtcaccaataaaggctttctcagcgttgatgaagttcgccgcgtgacgcgcgcgttctccgccctggggacggaaaaggtgcgcctgaccggcggcgaaccctcgctgcgtcgcgattttaccgacatcatcgccgcggtgcgggaaaacccttctattcgccagattgcggtcaccaccaacggctaccggctggcgcgcgacgttgaaagctggcgcgatgccgggctgacggcgattaacgtcagcgtggacagcctcgatgcgcgtcagtttcacgccatcaccggccaggacaagtttcatcaggtgatggacggcatcgatgccgcatttgccgctggcttcgaaaaagtgaaggtcaataccgtgctgatgcgcgacgttaaccatcaccagctcgacacttttctggcgtggatccagccgcgccgcattcagctgcgttttattgaattgatggaaaccggcgaaggcagcgatctgttccgccgccatcatatctcgggcatggtgctgcgcgatgagctgctgcgtcgcggctggatccatcagatccgccagcgtagcgacggcccggcgcaggtgttttgccatccggattatgccggggaaatcggtctgattatgccctatgaaaaagacttctgcgccacctgtaaccgtctgcgcgtctcttccgtgggtaaattgcacctgtgcctgtttggcgaaggcggcgtcgatctgcgcgatctgctcgccgatgagcggcagcagccggcgctggaggcgcgcatatccgaggcgttaacgcataaaaaacagacccatttcctgcatcagggcaacaccggtattacccagaacctgtcctatattggcggataattcattttaaggagcgatcagatgagccaggcaagcgctgagtttatcccgacccgtattgctattctcaccgtctccagccgacgtggcgaagaagacgacacctccggacactggctgcgcgacgcggctgaggaggcggggcacgtcatcgtcgataaggcgattgtgaaagagaaccgctacgccattcgcgcccaggtgtcggcgtggattgccggcgatgaggtgcaggtggtgctgattaccggcggcaccggttttaccgacggcgaccaggcgccggaagcgctgctgccgctgtttgaccgcgaagtggaaggtttcggcgaggtgttccgcatgctctccttcgaagagatcggtacctcgaccctgcagtcccgcgccgttgccggggtggcgaaccgcacgctgatttttgcgatgcccggctcaaccaaagcctgtcgtaccgcatgggacaatattattgcgccgcagctcgatgcgcgcacgcgcccgtgcaactttatctctcatcttaagaagtaatttatgacgcagttgacccatattaacgccgccggcgaagcgcacatggtcgatgtctcagggaaagcggagacggttcgcgaagcgcgcgccgaggcctatgttgaaatgcaggccacgacgctggcgatgattatcgacggtagccatcacaaaggcgatgtctttgccaccgcgcgcattgccgggatccaggcggcaaaacgcacctgggagctgattccgctttgccatccgctgatgctgagcaaagtcgaagtcaatctgcaggcgcagcccgagcataaccgggtgcgtatcgaatccctgtgccgtctgaccgggaaaaccggcgttgagatggaagccctgaccgccgcttccgtcgccgcgctgacgatttacgatatgtgcaaagcggtgcagaaagatatggtgataggtccggtgcgcctgctggcgaaaagcggcggcaagtccggcgatttcagagtggaagatagccatgattaaggttctttttttgcccaggtgcgcgaactgctcggcaccgactccctgaagctcaatccgcaaggcctgaccacggttgaagccgttcgccagcagctgatcgcccgcggcgaccgctgggcgctggcgctggaggagggcaagctgctggcggcggtaaaccagacgctgacgacgtttgatcacccgctggcggccggtgatgaagtggcgtttttcccgccggttaccgggggataacatgacgcagacgcgtattatagtcagccatgaccgctttaaggtcggcgacgaatacccctggctggccgagcgcgatgaagacggcgcggtagtgacgtttaccggcaaggtccgcaaccacaaccttggcgacagcgtcaaagcgctgaccctcgaacattatccggggatgacggaaaagtcgctggcggagattgtggaacaggcgcgcgagcgctggccgctgggccgggtgacggtgattcaccgtatcggcgagatgtggcccggggaggagattgtctttgtcggcgtcaccagcgcccaccgcggtagcgcgtttgcggcgggggagtttattatggattacctgaagacccgcgcgccgttctggaagcgggaggcgacgccggaaggcgagcgctgggtcgatgcgcgagatagcgaccgtgaagcggcagaacgctggtagtgtggtacgcttagaagataaatttcgttaatcaggagacagtcatggatagatatcctcgttccggggcgatcgtacagggtcgcagcggacttcaaacttatatggcgcaggtgtacggctggatgacggtcgggctgctgctcacggcgtttatcgcgtggtttgcggccaacacccctgcggtgatgatgtttgtcttttccagcaaaataacctttttcggcctgatcatcgcccagctggggctggtattcgtgctctccggcatggtgcagcggctgagcgcgggaatggcgaccaccctgtttatgctctattcggcgctaaccgggctcaccttatccagtatattcctcgtctatacctactcatcgatcgccagtaccttcgtggtggcaggcgggatgtttggcgtgatgagcctttacggctataccactaaacgcgacctgagcggcttcggcaatatgctgtttatggcgcttatcggtatcctgctggcgtcgctggttaacttctggctgaagagcgaagcgctgatgtgggcggtgacctacatcggggtgatcgtcttcgtcggcctgaccgcctatgacacccagaagctgaaaaacatcggcgagcagattgacgttcgcgatgcgtcaacgctgcgcaaatactcgattcttggggcgctgacgctgtatctggactttatcaacctgttcctgatgctgctgcgcattttcggcaaccgtcgttaactcgttcccggatctcaggcggtggtaaacctgtagccccggtcagcatcagcgaccggggcttttttgactactcgcccgccagcttgcgctggtttttctcccgcagatgcttcgcccggctctccagaatcaggtagccgatggtcgccagcagcagcggcaggaagtagtacagggcgcgataggcaagcagggcggcaataatcgcgccgcgcgaaatctcttccccggaaagcatggcgataaataccgcctcaagcacgccaatgcctgccggaatatgcacgataacccccgcaatgctgctgaccagcagcacgccgagcacgagaaaatagtccacctgcgggcccagcagcagccagataatcgcccccatcgccatccagttcaggctggaaaccgccatctgcaatatcgcgaagcgccaggacggcagcaccagccgctggccttttatcgtcagatggcgctttttagcaaaggcacaggcccacaggtaaaacgcggaaatcagcagtaaaacgacgcccagaatttgcagcgacgactggctgatataccagcgctcgggcaccttcaccatgccggagctaaaaataatgccgccgagcagaatatagcccagccagttggtggtaatgctcagggagaagatacgggtaatggttgcgccgctcaggccgaggcgcgagtagagccgatagcgcataccaatcccacccacccaggtgctgagcgtcaggttaaaggcgtagcagataaacgacaccagcatcacctggcgtttcgccagcttgtggccgcagtaagcgcgccccagcaggtcgtagcagccatagatcaggtagctggcgataaccaacccgatggcgctgagcagcgccgtacggttgtaatcgcgaatgaccttccacacgtcctgccagtcgattttttgcgcgtagaccaccagcagaacgacgacggcgataaaaaagagcaccgtcaggatttttttcgccatctgccagcgagggtgagatttcgccatcaggatttcacctcctggttttccgggtccacgcggtcctgggtttctatttctggctgtaccgggggctgaacccgcgacagcagcggcgtatgggccggtagccatccgacccaggcagggaagtggcgcaggaagtggaacgccagcacgctaatgccgagccgccaccatgttcgtttcgacaaaatgcgcttatcgacctcgcggcagtcgttaaggattaagccattgagattatcgcgcagcgtctggttaaactcgcggtcgtgaatcaccaggttggcttccagattcagcgacaggctcagggggtcgaggttgctggagcccaccgtggcccagtgatcgtccgccagcgccactttgccgtgcagcggacggcggcgatattcgaaaatctgcacgccgccttttaccagatagtggtagagcaggcgcgcgccgaatttgacaatcggaatatccggctcaccctgaacgatgagcttaacgcgcacgccgcggcgggcagcgttgcgcatagcgtgcagcagccgatagcctgggaaaaagtaggcgttagcgataatcacttcccggcgggcgctggtcagcatcttcagatagtgacgctcaatatcatcgcgatgatcctgattatcccgccagataaacagcgcctgcgcctcgccggggttgcggttgatttcaggcttatgccgacgccgctgccaccagcgtcgggtcgcttcgctggtggggaggttttcgagttcaaattgcagaatatcgatcaccaccggcccttcgacctgtacggcgtaatcctgtttggcctccggaccgtaatcggtcatgtgctcggcggagtagttaatgccgccgacaaaggcggtaacgtcgtcgatcaccacgattttgcgatgcatacggcgaaataaattagtgcgcatgccgagcaggcgcgggcgcggatcgtaatagcgaaaaatcacgccagccgacgtcagctcgcccacaaagctttcgcttaaatccggcgagccgtagccgtccagtaagacctcgacgcgcacgccgcgctgggccgcttttaacagaacggcatggagctgtttgccgacgtcatcttcaaaccagataaaagactcaaggatcacccgctgctgcgctcggccgatggcggcaaacagcgccggataatagttatcgccattttctaatagccgaatgcggtttccttcctgccagctgcatttcacagatgtatctccacgctaagcggtgcatgatcggacagatgacgccactgttttaacgccagcgctctgggctggctggcgtgggcgttttttacgtagatgcggtcaagtcgcagcagcggaaagctgaccgggaaagtgcgcgccgggcgccctctggcgcgggtaaaaatctcctccagcccggcctgggctttaagctggcggttcgcctgctgccgccagtcgttaaaatcaccggctaccaccaccggttcgcccgcgggtaaaccgttcacccagtccgccagcatcgtcagctgggcctggcgttgatgagcgcgcagtcccaggtgtacgcagaataaatggatagcgatgccgctttccggcgggacgatgcggcagtagagcaggccgcgcttttcgctgttgccgaccgaaacatcgagattttgataatgttcaatgggaaagcgggagaggaccgcgttaccgtgatgcccttccgggtaaacggcgttgcggccgtaggcgtaatcgctccacatggtatcggccagaaactcatagtgggtggtatccggccagttttcgatatgcagcggatgaatttcgtgcgcccccatcacctcctgcaggcaaacaatgtcggcgctgacgctgcgcaccgcttcgcgtaattcgggcaaaataaagcggcgattgaacgcagtaaaccctttatgggtgttaattgtcagcacgtttaacgaaaatcgcggcatttgtttgtccttatttctctgggcaatgtcactttcctgtaggaaatagtgtagtagaggtcacaaaaagatgcggtgatacggaattttccgtaaagtgcggtactctgagtagcagagaaaaatccttcaggagagaagccatgaagtggcaacaacgtgtacgcgtcgcaacgggtcttagttgctggcagattatgttgcatctactggtcgtggcagtactggtgatgggttggatgagcggcgcgctggtgcgcgtcggattaggtttgtgcgtgctgtacggcgtcacgttagtgtcgatgctgtttttgcagcgccatcacgatgagcgctggcgcgacgtcggtgatttccttgaggaactcaccaccacctggtacttcggtaccgcggtgatcgtgctgtggctgctgtcgcgcgtgctgcacaataacctgctgctggccctcgccgggctggcaatactggccggtccggcggtggtttcactgctggcgaaagataaaaacagatacgctaaatcgttcgggctacaacaaggcggcaacgcagcgaatccccagaagcatagataactatgtgactggggggagcaaggcgagccaacgcagttgtggcttgaacgatgacgagtattacgcgatctttcttcggaacatcgcatacgccgccgagccggtggtggccgctatgaccagtagcggccacaaacttccccacacgatttccagactcgcatccttcaaatagatctgcttggtgatatcggtgaaatgacgaatcgggttcacccacgtcaggttttgtagccataccggcatattttccaccggcgaaacgtagccggagagtaaaatcgccggcatcataaagacgaatacgccgataaacgcctgctgctgcgtggagcacagcgacgaaatcagcagtccgaatcctaccagcgacagaccgtaaacgatcatcgtgaagtaaaacagcagcagtgagccagcgaagggaatctggtaggcccagataccgatccccagcacgatggtcgcctgaagggtggcgacaatcagcgccgggaccgctttaccgataaagatctgccatgttgccagcggcgagaccagcagctggtcgaacgtcccctgttcgcgctcgcgggcaacggagagcgaggtgacgatcattacgccgatggtggtgatcatggcgatcagcgacggcaccacgaaccatttgtaatcgagattcgggttataccagttgcgtaccaccagctcgctattgttcggtttggctttgccttccagcaggtcctgctgatagcttttgacgatctgctggaggtagttggcggcaatttgcgcgctgttggagttgcgcccgtccagcagcagctggagcggggcggtctggttggtgtcgaggttgcgcgaaaaatccgccgggaaacgcacgaccaatagcgctttttgttcatcgatggtcggtcttatttcctgagggcttttcagtaacagcacgtgggtgaaggctttggcgcgggcaaagcgctgggtcagctccacggcgtgcttgccgttgtcttcgttatagatggcgatggtggcgttcgttacctccagcgtggcggcaaaggggaacagcagcacctgaatgagcaccggcataatcaaaatcgcccgcgtctgcggttcacgcaacagcgactgcagctctttgcggattaacgtccataagcgatgaaacatctcatattctctctttgtgagccccggattgcgctgcgcttatccgggctacccgtttgccagcccttgtaccggggggcgcgcaggcaaattaatccagacgccgtttggttttcagccacgtcaggccgataaacatcaccgccgaggcgattaaaaacatcacattcaccagcagcaccaccgggatgttgcccgccagaaacaggctttgcagggtgctgacaaaatagcgcgccgggatcacgtaggtcaccgcgcggattatcgccggcatgctgtctatctgaaaaataaacccggacagcataattgaaggcaggaacgcggcattcagcgcgacctgcgcggcgttaaactggttacgggtgatggtggaaatcagcagccccatgcccagggtactcagcaaaaacaggctggtaataaaaaacagaatcaccagcgaaccgcggaacggcacgccgagaataaacaccgccaccagcatacacagcagcatcgccagcatgccgaggaaatagtaggggatcagcttgcacagcagcagctcggcgcgggtaatctcggtcgacagcagcgcctccatggtgccgcgctcccactcgcgggccaccaccagcgaggtcaggatcgcgccgactaccgtcataatgatggtaatcgcgcctgggataataaaatgctggctgatcgcggccgggttaaaccagtagcgcgtctgcacgtcgattagcggctcgaaggtttcgccgcgatcttccgcccgctgctgctgccagatttgccagatgccttcgacgtagccctgggcgaagttagcggtattgggttcgctgccgtcggtgatgagctggatcggcgcatcgtcgccggggcgggccatcttctggtcgaagtccaccggcagggttaccagggcgcgaatgcgtcccgcctgcatcatctgcaccagttcctggcggttatcgctgatggtggcgtcgatataaggggagccggtcatggtatggacaaaatccagcgcctcttcgctctgctgctccagcagcacgcccacccgcagcttgctggagtcgaggttaatcccgtagccaaagataaacagcagcagcagggggatgaccaccgcaatcagccagctgctggggtcgcggacaatctgccgcgtctctttcacgcacagggcgcgtacgcgccgccacgatagcagtttaccgctcaccggcgttctccttatcccagtcgtgaatgagggtgataaacgcctgctccatcgttggatcaggctgttcatcatccgccgccagcgccttcagatcgtccggcgtgccgctggcgatcagtttgccgcgatagaccaggccgatacgatcgcaatactccgcttcatccataaagtgggtagtgaccatcaccgtcacgcctttatccaccatgctattgatatgcagccagaattcgcggcgggtgaggggatcgaccccggaagtgggttcatcaagaaacaggatatccggctcgtgcatcagcgagcaggccagcgccaggcgctgtttatagccgagcggcagatcgtcggcggcctgccgggcgatgcttttcaggccaaacgcctcgctcatgctggcgattttgtcgttctgcgcccgtccgcgcaggccgtagacgccggagaagaagcgcaggttctgctcaacggaaaggttgccgtagagcgagaacttctgcgccatatagcccagatgctgacgcgccttgccggagctgactttcaggtccatgcccagcaccagcgctttcccggaggtggggaccagcaggccgcacatcatcttaaacgtcgtggactttcccgcgccgttaggcccgaggaggccgaaaatctccccgcgtttgacctgaaaatcgacgtggtcggtggcggcaaaatcgccgaatttcttggtcagggtctgcgcttcaatcaccgtgtcctcacgggagcctcccacggtgtggataatgttgcccagcggcgattcggcagtcccggcgccgcccagcaggtcgataaaggcatcctcgaagcgcggcgcggtttcggcgacctccagcggcggcatatcgccagccttctgtacatcgctgatcctggcctcttttttaaggatcaggcgtaccgatttaccctgaatcacgccatcgctgacctgcggcagcttcagcgtacgctggaggaggcggcggttattctcccgggcgctggaaaccaaaaagctgcgtccggccatggtctgcgtcagctcttttggcgccccctggtagagcagctggccctcgttcatcaacagaacgtcccggcactgctcggcctcatcaagataagaggtgctccagaggatcagcattccgtcgcccgccagttcgtgcaccatctgccacagttcacggcgcgagatagggtcgacgccgacgccgggttcgtccagcagcaggactttcggttcgccgacgagggtgcaggccaggccaagtttctgcttcatgccgccggaaagcttgcccgccagccggccggtaaaggggccgagggaggtaaactccagcagcctggcgaaggttttttcccgcgcctcgccggtcacgctgcgcagatcggcgtagagcgtcaggttttccatcaccgtcagatcttcatacaggccgaatttctgcggcatatagccgagcaccgcatgcagggcgctgtcgtcggcaatcgggtcgaagccgatcactttttcgctgcctgcgtcgggcttcagcagcccggcgagcatgcgcatcagggtggtttttccggcgccatccgggcccaccagaccggtcacatagccggagtgaatggtgcagtccagcggcgcgacggccgggcgatccatgccggcaaagcgccgggtcaggccgctcagcgtaatcacgtcctcgctcattggccgtttccgtgactgaaggtgacggtgaccggcattccctggcgcagcgcgtcgtcggcatcggtgaccacaatacgcaggcgataaaccagatcggtgcgcaggtccggcgtttccacagttttcggcgtgaattcagcggttggggagacgaagccgattttgccgcggtagggtttatccgggcgactatcggtgtaaagcagcacttcgcgacccggctgggcctgaccgaggtttttttcatcgatataggcgcgtacccacaccggatgggttaacgataacgtcatcaccgtgccgccagcgctgagcatgctgcccggctcgacggcgcgggtcatcagcgtcccgtcggacggcgaggccagcgtggtatcgtgcagatccagcttcgcctgtgccagcgcggcctgcgcctgttcaaggctggctttggcctgggcgatttcctgcggacgattaccggcgcggtactggcgcagcttatcctgcgcggacttcagcgtcgcctgggcctgatcgcgcgatgagcgggcgttttccaggtcgttagcggagatggcgctgcttttgcgcagccccagctggcgctggtaaaaattctgcgcatagtcgtaagcggcctgcgcctggttgaccgcggcggcggcctgagcgatctcttccgagcgataccccgccatcatcaggtcgtactgcgcctgggcggtggaaacgttggcctgagcctgctgcagggcattctcgtagggcgcgcggtccagctcgcccagggtctgcccggctttaatcgcatcgccctcgtcgacgctgagcgacgccagccgcccgcccacgcggaagctgaggttgacggtacgaatatccacgttgccatacagcgtgagcgctttctgctggctgctctggtaccaccaccagcctccgccaatgacagcggccagcaggagaagcagcacaacgacgatgagcggttttttcatgactccagactcctttgcgataatccttccagaacgaaatcaatatggcaggtgataacctcaataatttgcgcggttttgtcccgatcgaactcagcccagcccgcgcggcgcagcaccgtttcccgaccaaggcgaaaagcgagaacttcgcccagcagcgcgtgggtgtggaggaccatttccgtgctgtcagcgttaaggccggtataggcggcgattaagcgggtcaggtagcagtgtagcggagcaatcacctgatcgtggatgagccggtaggccggcgttggcgacagctgctcgcgggagataaatttgctcaaattgacggtgtcgtcctgggtcagcagcaaaatcatattctggcaggcgcccagtatcagggtgcgcatggcggctttatccggaacaggctcagcgcacagcgcttccgccgcctgcgcgtgggggcggaaattgtgctcgataaaatcggcaatccactgggcgcaggcgagatagagatcgtccttggaaccaaaatagtaggtaatggcggcgatattctgcccggcctgggcggcaatatcgcgggttgtggcgtgcaggccgtattcgccaaactgggcgattgcggcggcgataagctggcttttcgcctgctcgcccttactggtcgtgggagtggttgtcatcgcgcgagaaaagttaatcaatcgattgattaactctaggcgcaggttggcggtttgtccaccgtttgctgctagatatgaaatccttcgcgactcagctcttcggcaacccaggcaaagaagatcttcactttctctttttgttcattcgggtgcggtaaaacgaagtgatgcgcgttaaccggcatgctgacgtcgcgggtaaagacgggttccaggtggcgttggctcacgctctgcccggccagcaaattactctcaagaataatccccattcccatccgggcagcctcaatactcatataggagcggtcgaaattaaaaataaagtttttattccagccgcgaaccttatgccacgacagccagttgctccagccgatcagcgtgctatcggaatgaataaggtcgcaggccagcaggtcttcaatggactgaacgtcgcggccggctaaataagtcgatgagctaaaggggagcacgcgttcattttttatggtcttgaccaccagggttggccactgtgagagcccgtggcgaatatcgatatcaatattatcgcgggagaactggatgctttcataagagcaggtcaggctaattttaagctccggccaggcctggcgaaatttatccagacggggcatcagccacaataatccaaagctcggcgcggaatgaatccgtaaataatcctggtggatatcattaatcacctggttagtggcctgaccaataatatttaacgccccggaaacctctttaaggtatttttcgccaattgtggttaataccatccctttactgctacgggaaaatatcttttttcccagatactgttccaggctggctatctgatgacttaccgcggaggccgtaatattaagattctctgccgccaggttcaggctgccggtatcggccacttcaataaatgcctgaatattacgtaaggatggcatcggcaagcttttattctgcagcggctggttcatgatttcctccggcgggggggaataacgcaaggcgatttttttactcagaaagaaggacgtccagccgttatcccagaaaatgatggtcagcatagcacagccggaaaataagtgatggcgcaatccgtgatgaagttaacagttttaaatgcacaactctcgaaaaaataattgacaggaatttgagtgcagtcacgaagcaaatttttctcacgcgtaattgagcttttttgaataccctttctttttgggattgttatattgcaactacaggcctgataacagggcgcgatgcggtaagggtcgcgacaaaaacataaaaaaataaagaggataccctatgtcacgtatagatactgttgtctgtactgacgccagaaaaacaaaatatcgtttcgtggtattgacgatgattttcctggtgtatgccataaattacgccgacagaacgaatatcggcgcggtactgccgttcattattgacgagtttcatatcaacaactttgaggccggggccatcgccagcatgtttttcctcggctatgcggtaagccagatcccggccggtttttttattgccagacgcggcacccggggactggtctcgctgtctattttcggcttttccgcttttacctggctgatgggcaccgtgagctcggtgtttggcctgaagatggtgcgactggggctggggcttagcgaagggccgtgcccggtggggctggcttcaaccattaataactggttcccgccgaaagagaaagccacggcaacgggtgtctacatcgccgccaccatgtttgcgccgataatcgtaccgccgctggcggtgtggatcgcggttacctggggctggcgatgggtctttttctcctttgcgataccggggattgtggcggcggtcgcgtggtacctgttggttaagtcaacgcccgcggaaagcggatttgtttcgcaacgcgaactggaagagattaatgccgggcgtgaaactgataaaaacgccgtccgcgaaaatatattaattgccgaccgcttcacctggctggataaaattattcgggtgaaaaagatggcgcctgtcgatacggcgaaaggattatttacctcgaaaaatattcttggtgactgtctggcctattttatgatggtcagcgtgctgtacgggttattaacgtggatcccgctgtatttagtgaaagagcgcggttttgacgtgatgagtatgggcttcgtggcgagtatgccgtgcatcggcggctttattggcgcgattggcggaggctggatctcggataaagtgttaggccgccggcgtaaacccaccatgatgttcaccgcgatttcaaccgtggtcatgatgctcattatgctgaacattccagcaagcacctgggcggtatgtattggattattctttgtcggtttttgtttgaatattggctggccggcttttaccgcctacggaatggccgtttcggacagtaaaacctatccaattgcctcttctattattaatagcggcggcaaccttggcggctttgtcgccccgatggccgccggttttttacttgatcagaccggcagctttaattctgtatttacctattttggtatctgcgccgcaataggtctggtggtgattcttttcctcgatgagccacaataacggcaatatttctgttaattaatatgacgtcatgtcatggagtgaaaatatgttattaaaagataaagtcgccattattactggcgcggcctccgcacgcggtttgggttttgccaccgccaaattatttgccgagaacggcgccagcgtggtcattatcgacctcaatggcgaagccagcaaagccgctgcggcggctctgggcgaaggccatcttggtctggcagcgaacgtcgccgatgaagttcaggtgcaggcggcaatcgaacagattctggcgaaatatggccgggtcgatgtgctggtgaataacgccggcattacccagccgctgaagctgatggaaattaagcgcgccaactatgacgcggtgctggacgtcagcctgcgcggcacgctgctgatgtcgcaggcggttattccggcgatgcgggcgcaaaaatcaggcagcattgtctgtatctcttcggtttccgcccagcgcggcggcggtatcttcggcggcccgcactacagcgcggcaaaagccggtgtgctcggcctggcgcgggcgatggcgcgcgagcttggcccagataacgtccgcgtaaactgcatcacgcccgggctgattcagaccgatattaccgccggcaagctgaccgacgacatgacggccaatatcctcgccgggatcccgatgaaccgtctgggcgatgcggtggatatcgcgcgtgccgccctgttcctcggcagcgatctctcttcctactcgaccggtatcaccctggacgtgaacggcggcatgttaatccactaagcgaggcaatcagatgaagatgacagaaacacaacaagttgccgcggcggcgtggcgtatccgtcgctatgccctgcaaatgggcgaagtccagggacagggctatatcggccaggcattaggctatgcggatgtgctggccaccgccttcagccacgcgatgcgctaccgtccggaagatccgcagtgggaagggcgtgaccgttttctgctctctcacggccattacgccatcgcctattatgcggcgctgctggaagcgggaattatcccggaagaggagctggagacctacggttccgacgacagccgcctgccgatgtcgggcatggcgacctatacgcctggaatggagatgtccggcggctcgctggggcaggggctctccatcgccgtcgggatggcgctcggtctgaagaagaagggcagcgcatcctgggtttttaactctatgtcggatggggagctggacgaaggttcaacctgggaagcggcgatgtcggcggcccactacggcctgactaacctgattaacctcgttgacgtgaacaaacagcaggcggacggcgattcgcgcaaaattctcggctttgagccgctgcatgaaaaatgggccgccttcggctggtacgtgcagcgcgtggacggtaacgatctggcggcggtggtggccgcttttgataacgcgaaaaatcatgcgggcaaccagccgcgggtcattttatgcgacacgctgatgggcaaaggggtgccgttccttgaaacccgcgataagaaccattttatccgcgtcgatgccgacgaatggcaaaaagcgattgcggtgctggacgccaacaaaccggaaggagtgctgtaatgagccagagtaaaccacgcttaaaaacgtcggcgatgatcgcctccattgctgatgaaggtcaggcgaccgtttccgcgccgtttggcgtcgcgctctcgaagctggcggcccagcgcgcggaaatcgtcggtatgaccgcggacctgtcaaagtataccgatctgcatattttcgcccaggcctttccggatcgcttcttccagatgggaatggcggagcagctgctgatgggagccgccgggggaatggcgaaggagggatttattcccttcgccaccacctacgccgcttttgccacccgtcgcgcctatgattttatccatcaggtcatcgccgaagagcatctgaacgtgaagatctgcgcggcgctgccgggcctgaccaccggctacgggccgagccatcaggcaacggaagatctggcgattatgcgcggcattcccggcatggtcatcgtcgatccctgcgatgcgctggagatagagcaggcggtaccggcgattgccgaccacgacggtccggtgtatatgcgtctattgcgcggtaaggtgccgctggtgctcgataaatatgattatcagtttgagctgggcaaggcgaagctgctggaggacggtaacgatgtactgattatctcttccgggctgatgaccatgcgcgccctcgaggcggttgaaaaactgcgggccgataatatcagcgcggcggtgctgcatgtccccaccatcaaaccgcttgatgaaaaaacgatcgttgcgcaggcttcgaagcccggccgtctggtggtgaccgcggaaaaccacacgtcggtcggcgggctgggggaggcggttgccgcgctgctgatgcgtaaaggcgtacgctgcgagctggataccgtcggtttgcctgacgaattcctgctggccggcgcgcttccgacgctgcacgaccgctacggcatctccaccgcgaagatggtcgaaaaaattaagtatcgcctgcgttaatcgccttcgccgccgcgttctgcggcggcgtttctctgcttttgttcgcggtttccccgtcgaggcattaaacgggctatttcggggacgcctggcgcgaagcgccatcgccgcttctcatcgacaggacggggagcagtggtttgttagccggaggattcttttcggcagattttatgcggttcgtcacaaaatctgctagactgcgcagcttcatggcattgtggtttttgccatctctttcgcaataatctccctgaaaactacgcctgtgacgggccggggcggttcggagttgttatgtcttttgattcccttggcctgaatcctgaaatcctgcgcgccgtcgctgagcagggctacgttgagccaaccccaattcagcagcaggctatcccggcagtattacagggtcgcgatctgatggccagcgctcagaccggtaccggcaaaacggcgggatttacgctgccgctgcttcagcatctgatccaaaaggagccgcatgctaaagggcgtcgcccggtgcgtgcgctgatcctgaccccaacgcgcgagctggcggcgcaaattggcgagaacgtccgtgattacagcaaatacctcaacgttcgctcgctggtggtgttcggcggcgtgagcattaatccgcagatgatgaagctgcgcagcggcgtcgatatcctggtggcaacgccgggtcgtctgctggatcttgaacatcagaacgccgtgagcctcgacaaagtcgaagtgctggtgctggacgaagccgaccgtatgctggatatgggctttattcacgatattcgccgggtgctggcgaagctgccggccagacgtcagaacctgctgttctccgcaaccttctccgatgacattaaatcgctggcggaaaagctgctgcataacccgctggagatcgaagtcgcccgccgcaacaccgcctctgagcaggtgagccagctggtgcattttgtcgataaaaagcgcaaacgtgagctgctgtcgcagatgatcggtgaaggtaactggcagcaggtgctggtctttacccgcaccaagcacggcgcaaaccatctggcggaacagctcaataaagacggcatccgcagcgccgctattcacggcaacaagagccagggcgcgcgtacccgcgcattggctgactttaaatccggcggcattcgcgtactggtggccaccgatatcgccgcgcgcggtctggatattgaagagctgccgcacgtggtgaactacgagctgccaaacgtaccggaagactatgtgcaccgtatcggtcgtaccgggcgcgccgcggccacgggtgaagcgctgtcgctggtttgcgttgatgaacataaactgctgcatgatatcgaacgcttgctgaaaaaagagatcccgcgtattgccctggcgggctacgagccggatccatcgattaaagccgagccgattcagaacggtcgtcagcagcagcgcggcggcggtcgcggtggccagagtcagggccgcggtggccaggggcaaggtcgcggtcagcagtccgctccgcgtcgtaccgatggcgaagcgccgaaagcgcgaactcaggacggtaagcctcctcgccgtcgtcgcccgcgcaaacccgccgcggcggagtaacactatcccgtcactcctgtggcgagagccgcgatcgcgcggctaagccactgatgggttgtccgggtaagactccttacccggacgcgcttcgctcagcataacctcgagcgtgattccagtttgctcagaaagacgttccttccgacggctaaaaaatggcacaatagtggctgtttatacagtattcaggttttctcatggctttgaccgcagcgctgaaagcgcaaatcgccgcctggtataaggcgcttcaggaacaaatccctgactttattccccgtcctccgcagcggcagatgattgccgatgtggcgaagacgctcgccggggaagaggggcgacatctggcgatagaagccccgaccggcgtcggcaaaaccttgtcatacctgattcccggcatcgccattgcccgtgaagaacaaaaaacgctggtggtcagtaccgccaacgttgctctgcaggaccaaatctacagtaaagacctgccgctgctgcgcaaaatcattcccgacctgcgatttaccgccgcctttggccgcgggcgctacgtctgcccgcgtaacctggccgcgcttgccagcaccgagccaacgcagcaggatttactggcctttcttgatgacgaactcacgcctaacaaccaggcggaacagaagctgtgcgcgacgctgaaagcggaccttgatagctacaaatgggacggcctgcgcgatcataccgataaaaatgtggatgattcattatggagccgcctgagcaccgataaagccagctgcctgaaccgcaactgccactattatcgcgaatgtccgttttttgtcgcccgccgggaaatccaggaagcagaagtggtggtggcgaaccatgcgctggtgatggcggcgatggaaagcgaagcggtgctgccggaaccgaagcatctgctgctggtgctggatgaaggccaccatcttccggaggtggcccgcgatgcgctggaaatgagcgcggaaatcaccgccccctggtaccgcctgcaactggatctttttacgaagctggtcgcgacctgcatggagcagtttcgccctaaaaccacgccgccgctggcgaatcccgagcgtctgaatgggcattgcgaggagctctatgagcttatctcctccctgaataatatcctcaatctgtacatgccggccgggcaggaggcggagcaccgcttcccgatgggggagctgccgcaggaagtgatggagatttgccagcggctggcgaagctcaccgaaacgctgcgcggtctggcggagctgttccttaacgatctgggcgaaaaaaccggcagtcacgacgtggtgcgtttgcaccgggttctgctgcagatgaaccgagcgctggggatgtttgaaagccaaagtaaactgtggcggctggcatcgctggcgcagtcctccggcgcgccggtgaccaaatgggtcacccgcgacctgcgggatggccagatgcatatctggttccactgcgtggggatccgcgtcagcgatcagcttgagaggctgctgtggcgcagcgtcccgcatatcgtcgttacctctgcgacgctacgctcgcttaatagcttttcgcgtctgcaggagatgagcgggctgaaagagaaagcgggagaccgctttgtggcgctggattcgccctttaatcacgtcgaacagggtaaaatcgtcattccgcagatgcattatgaaccgcttatcgataacgaagagcagcatattgccgagatggccgcctatttccgggaacaggttgagagcaaaaagcatctcggcatgctggtactcttcgccagcggaagagcgatgcagcggtttctcgaacaggttaccgatctgcgcctgctgctgctggttcagggggataagcctcgctaccggctggtcgagctgcatcgtaaacgcgttgaaggcggcgagcgcagcgtactggttgggctgcaatccttcgcggaaggcctggatttaaaaggcgaactgttaagccaggtgcatatccacaagatcgctttcccgccgattgacagcccggtggtgatcaccgaaggcgaatggctcaaaagcctcaaccgctatccgttcgaagttcagagcctgcccagcgcgtcattcaacctgattcaacaggttggccgcctgatccgtagccatagctgctggggagaggtggtaatttatgataaacgcctgttgaccaaaaactacggtaagcgtttattgaatgcattacccatatttccgatagagcagccagccgtccctgaggttatagtaaaaactaaaacaaaacagacgcgtcgcaaacggcgttagcggtgcaatgtcgacgcggtgagacgctcagaggagcctgcaatggactacagcaagatcgttaaagaagtcgggcgcggaaaaaaccacgctcgcgacctggacgtggaaacggcccgcgcgctctactcgcggatgcttaacggcgaggtgcctgaccttgagctcggcggcattcttattgccctgcgcatcaagggcgaaggtgaagcggagatgaagggcttctatgaagcgatgcaggagcacaccattaagctgacgccgccggtcggcaagccgatgccgattgtgatccccagctataacggcgcgcgtaaacaggctaacctgacgccgctgctggccgtcctgctgcataagctcggcttcccggttatcgttcacggcgtgagccacgatcccacccgcgtgctgacggaaaccatttttgacctgatggggatcccggcaacgcttcacgcgggccaggcacaggcgcggttagatagtcaccagccggtttacgttccggtcggcgtattttgtccgccgctggaaaaacagctggcgatgcgctggcgcatgggcgtgcgtaacagcgcacacaccctggccaagctggcgacgccgtttgccgaagatgcggcgctgcgcctgtcgagcgtttcgcatcctgagtacgtcggtcgggtcgcgaaattttttgccgggatcggcggccgggcgctgctgatgcacggtaccgaaggcgaggtttacgctaacccgcagcgctgcccgcagattagcctgattgatgagaccggtacgcgggtggttaacgagcgtcaggatggcgctgctgcgcaggcagtcgctctgccggagtcaaaagatcccgaagttaccgcgcgctggatcgagcgctgtatggtcgggagcgaaccgctgccgtcatcgttgaaaattcagctggcctgctgtcttttggccaccggcgtggtcttgtctctggagcaggggctggcgaaggtggctgagagctggtaaccctatcgcaggatcgcaggcaaaaaaaagcccgtccagtggcatggacgggcaaggcaagggtattaaaggatcttacagggttaaaacagtggcattacagggtgttgctgttgctacagggataactgacgattatttatagataaccgcagtaccgctcagtttgttgttgctgttagcggaggtaatgctatagccggttgcaccagcggcctcggctttttcagccagtttagcttccagtccatccagcgtcgtcgcgccttcagcggaaaccacaccaattttgttcatgctctctgcctgagccgatgtcaccggctgagcggcgaacgcgccgaaagacagagcggaaagggcgatagcggcggcagcatatttgatgtttttcatagttaatctctcgcaggttgttctgtataggggacgatgttccgtcgatgtgataagtatcacggtttttagcgggagataaaatcgaaggaaattaacagtcttcatctaattttttgaacgactattaatttattgaatattaataaattattttagccggcggcggcgaaacaggtcggggcggcgaacggggggctggaagggcacattttgccacgccgtttgccaaaaaacgtgcgcgaaaagataacgcgatgtgcgtaatgaacggtaaatattggtcagcgaagctggctatccttggagcctctgcgattatatcctgaaaacgtattgttatgtaaatctttctcctgttggcattttacgcagtatttcacccccgccaccgcccgtcggcgcgcctcaggaatcggctccccacattcttcacaaaatttgttgctttcccccgatgacagttcgtttcgcgcccgagctatcgcgtcgttgatggtgctgtcgatctgttcctgcaccgcgtcatcattcgcccagcctgatgccatagttcacctcgctatctcgcctctctttagtatagagaatatgggggtaaaaaatgaccagacaaggctcagatctctgaccattcgcgcagcaggttatggtaaagattaagcagagacaggacttcgtcactttcgccgtggcggctttttaatttctgaatattgccatccagttcaaacagcatactgcggcgtttatcgtcgcggatcattgactgaacccacaagaacgaggagacgcgaacgcctgaggtcaccggagtgacgcagtgcaggctgcttgaaggatagagcaccaggtccccggcagggagcttaaccgaatgctgtccgtaggtatcgttcacgaccagctcaccgccttcgtagctctccggggggcttaaaaagagcgtggcggaaagatcggtgcgcatccagcctccctgcgcctggctgcgtaccgcgccgtcgacgtggaaaccataagtttcgctctgctgataacgattaaacagcgggctggaaatcgctttcggcagcgcggcggcaaaaaacagcgagctgcgattcagcgccgccagtacgttgccctgaagttcgccgtaaagattgctgtgggtatcaacctgctggttatttttgacctgggcgcccagatcgccggtcgtcacgcgcccgtcgacccattccgcctgctgcagctgagcgataaaatcgtccacttcctgagagctgagaacggcgggaatatgatacatcatcgttttatctccggagaaaacggggcgtagccgccccggggtggatcagaagtgcatattggcggtgagcacgaaggttcgcggttcgcccgggtgataacggtagccgctcttgttaatcgaggcgacatagtcggtatcaaacaggttgtagacgttcagctgcaggtcgagattacggttaatgcgatagccgactttggcatcagccacccagtagccttcggtataggaaggcgtgccgaccgcaccgtcgctgccgcgatgcatgctgccgacgtatcgcgcgccggcgccgacggcgatcgcatcggtggcctgatactggctccagagagtaaacgcatgctctggcgtatacggtagcgcgctggtgccatcctgggcggtattcgcgccttcacgaacgctggcgtgctgttgggtatagccgccaataacctgccagtcgggcgtgatattaccggccagagagatctcatagccttcaacgcgcttcttaccgtactgcgaatagctgccgtcgtcgttctgctcgacttcgttttcaatatcggtgcggaagagggcggcggtcagcagcaggcgcttatccatcagctcccacttggtgccgacttcgctggttttggccttctgcggtttaaagtcggttcggttggcgctgctgccggtgccgctttgcgcgagggtgaagttgctccctcccggcggctgctgggagacagcgtagttgacgtagaggttgccgttatcggtcaggtggtacagcgcgccggccttccagttaaccaggttaccgctggttgaggtatcgacggtggtgacgggggtatttttcgccaccccggtcgggcaggcgatggcaccgcgtccggtaccgccgcacaggctggcgctatcgtatttggtctggtagttatccagacggatcccgccgttaagttcgacgtcctgggttatctgcagcgtatcgaaagcatagacgccgaaggtatccgtctgtccgttagcgttggcgccgctgcggttcaggccgccgatggagatatcgctgttcggatgataaatattcaccgccggaggcgtgagcggatataccccgtagttggtctgggtttcgcgggtaaattccacaccggtgctgacgtcatgaccgatggccccggtatagaacgtcgacgtcaggttagtctggttggtcaggatcttgttgctaatgtctttggtattcgccaggcgcgaccaggtccaggtgccgacatcgttggggtttggctgagtgatgtttgacgcgccgcccatcaccgcagtcatcaggtaatcctgcttcacgcgagaccagcgggtggtgttgcgaatcgtcgtcgtgtcgctcaggtcgtgctcgaagcgcatcgtcacggtatcggttgtggaatcatcgtagtcggagtcggtgccgtagaagttgctggtggcgaccttgccggagtgattcagcgccgaggtgccggcgttgggagcggaatagcccggcagaccgatggtgggaatgccgccgtcgggcgtgttgtgctgggttacgtgcagatagttaagatacaggcggttttcggtgccgaggccaaatgcggccgatggcgcgacgccgtaacgctcgtttttcacgttgtcccggcccgcatcgtgggttttctcgcccatcagattcagacgcaccgcgctggtttcgccaatggcctcgttaatatccagggtgccgcgtcggaaccaggcgctgcccgcgctggcggaggcgtcgatgccggaatcgaggcgcggctgtttgctgatcatattgatcgagccggtcggcgcgctgcgtccgtagtcggagcctgaaggtcccttgatgacttcgatctgctcggtattaaaagtatcgcggctgacgctgccgatatcgcggatgccgtcgacgtaaatgctgttggaagtgtccgctccgcgcatgtaaatcgcgtcgccggtcgtcgagttgccgttttcgccggcaaagaaagcgccgacgccgggaacgtttttcagcgcgtcggtgaggttagtgacgccctggtccttcatcacctgctcagagaccacgctaaccgtccgcgttgtgtcggcaatcgggcgtgaaaatttaggatcggcggagcgggtcggcgcgtacagcgatggcgtctgcgcttcgaccaccagcgtttcgccgctatttttttcagtgctatccgcggcaagcagctggccggtcggagaaagactcaggcataagccggtgaagagagtgagcgagtgaaaactgctgaacggcaaattgttatttttttccatatcaataagtgacttataattttaattaggccataacgaccgcagacgaagcgttgcttcgccccgaccactgcaggtgattttttacaaaagcaatgagtttgataatgattgtgataatcattatcaaacatcaggcgaatttctatcactcatttataaaaaaataaatacatttatttacattggctgcattttttctacataaaggcgcaccgggcaggcgaggttgttgcgcgaaaatggcattcagctacccggcctggaaaacggcgctagtacaggccgggtgggagggttagcgggcgtccggacgaacgaggtcaaagcgcaggctttcatcaatgccataataggcgctggggcctccggcgcgcagaatcggctgggctttggcggtctggtaaattccgtcttccagcagcgattcatcgatatgcaccgccaccacttcgcccagcaccagccaggtgtcaaccgctcgtccttctgcggttgttaactggatgcattgtgaaaggcgacactcgaagtttaccgggctttcggcgacccgcggcgcgctgacgatgcggctgggagcggcagtcagcccggcgcggatgaattcatcttcattatggggaagggtggcggaggtttcgttcatcgcgaccgccagaggccgggtggccagattccagacgaactctttagtctcagcgatattctgtacgctatctttccagccgctgctggcaaaaccaataatcggcggccgatagttaaagcagttgaaaaaactgtacggcgcgaggttacgctggccgctgttatcaagggaggctatccagccgatggggcgcggcccgataatagcgttaagcgggtcgtgcggcagcccgtgtccgtgcgaaggttggtaaaaatacatacgacacccgtgacaaaaaaagagataaccagactcacttatttaccgcgccgccgtcaacgggtatcttacgcggctgttcaaaggagattgccatgaaagcccagaaaccggggttacacccgcgtaaccgtcaccaacaacgctacgacctgcccgcgctgtgccaggcccaccctgagctccagggctttatcacccttaacccggtgggtgagcagaccatcgactttgccaatccgctggcggtgaaggcgctgaataaagcgctgctggcgcacttctacgcggtgaaacactgggatattcccgacggctttctctgcccgccggtgccgggcagggcggactacatccatcatctcgccgatctgctggcgctggatagcgggacgatcccggccaacgccagcattctcgatattggcgttggcgcaaactgcatctatccgctcattggcgtgcacgagtacggctggcgttttaccggcagcgaagtgaacgccgacgcgttcgccagcgcccaggctatcgtcaacggcaatcccggcctgactcgccagatccgcctgcgtcgtcaaaaagacgccaaagcgattctgaccggcattattcataaaaatgagacctacgacgcgaccctgtgcaacccgccgttccatgattccgccgccagcgcgcaggcgggcggtgagcgtaaacgtcgcaacctgggactgggcgaggagagcgtgctgaactttggcggccagcagcaggagctgtggtgcgaagggggcgaggttgcgtttattacgcagatgattgcggagagccagcagtttggccgtcaggtgaagtggtttacctccctggtttctcgcggcgacaatttgccgccgctctaccgtgcgctgaccgacgtcggcgcggtgaaagtggtgaaaaaagagatggcccaggggaataagcagagccgctttatcgcctggacctttatggacgaagccaaacgtcgccgcgctttataacgtgggctcggcgggtgccggcggtcccgccggtgccggcatcggcagaacctggtaagtttgtaccggcgcccgcacgcccgcgaggtcaaaatgccttttcacctgagtgtcgagggcgaaccttaccgtccactgcttcaacggcagggtggtaaaggtgacgcgcagggtgaaggcggtattgcttaagcccaccaatccagcgaaagagggctcgccaatgatcagcccgcgaatctcttcctgcgccatcacttccgcgaccgcgtctttcagcgcctggttggccttatccagatcctcctgtcgatcaacgtcatagttggccaccaccgagccgatcccgcgcacgaagttggcgaaggtggttatcgaagaccacggaataatgtgataagcgccagtatcctggcgtacgccgacggagcgaatcgacatacgttctaccgtcccggttaacggcccgatggtcaccagatcgccggtattcatgccgttctcaaactggataaaaatcccggtaataatatctttaaccagggtttgcgcgccgaacgaaatcgccaggcccagcgcgccggcgccggccagcagcggggcaatgttcacgcccacttccgaaagcaggatcatgatagtaatggtgctaatgaccaccgccagcgcgttgcgaaacagcgtcagcagcgttcgggcgcgggcgctgggcagcgggcggccgtgaatatccgatgccagccggttctcaatcaggctggcgagcagcgtccagccaattgccgagaagaagaggatcagcgcgatacgaatcagcacatcgaccgctttttgcccgctgccgttatgcatccactgccaaaaatcgaacagcccccacgcgctgagcagcagcatgatcgccacgcagaccgtcaggatacgcgcggctttcagcgacgcggagatccagccgttcagccgtttttgcagttcgggatagttgcgctgggtttccggcgacagggtgatggttttcgcaatccagcgcgacagaataccggagaccagcgcggcggcgccgatgatggccaggctgcgcagcgtcgcgcccatcataaatttcaggctgttgccgggatcgaacagggagaagaaaaacagcacgataaaataggcgcaggccagccagtgccagatcagcgcaaaggcgcggataaacaggctaaagaaggccagcgagcggtcggcgagatggataagcccctgggtaatcaatttcttattgtgaaatatcaggtacagcgcccagagcgtaatgcacagcataatcaccacgttggccagcgctccgaactgtacgttgacctggttggagataatcggcaccgcgacgatgagcccgtagccaatcaggctgctcagcgcgctgagacgcaggttccagtatttcgccgcttcatcgctgaggttaaacgggcgtagctccgggatgcgggggcaaaaaataagccgcagaatggccttgaaaaattcaatcagcgcgaaggcgttgagaaacaggctttgttgaaaggcgatggtgggattgttaccgttcaggcggtcgcttaaaagctggcccacgaagagcgtgagcgccagcagaagcaggtcaaaaataaacgcgccggcgatggttgcaggtagctgaagccagttgctgcggtcgcggtttttatgccgtccccagtggcccattttgcgatacagcggcagggccgccaggcgtaccagccaccagaacgcaaagaccaggcccgccagcagcaggaaatgccaggcggcgttggtgaaagtctgagaattaaacggtttgtgcggagaaccggtgatgttgcgccacagttgggagaagcgcgaagagagctgctctccgtattcgcggctgatgtgagtgacgttctccagcaccgtggtctcgtcttttatttccggcggcgtcagcttcggcgtactgtccggcggcggcgtggcggcggctttccgcaactgctcgataagctcctgacgggcgtcggcgttttcaagcacgtcggccagcgcgccgtaggccgctttcttctgcgccacatcgggttcactgctgctggacgggtccgctgtggttgccggaacgccgggcagcgtcgcggcccatagcggagcggtgaagagtagggcaagcagtaacaaaatccgcggcacaggcacctccattgcatctcaaaccaataagtatagaagatgagatccgcagagcgaggttgggatgattctggaaagcggctctcccgcgaagggagagccggggggcatcaggctacgtgctgcaaaaactcgcgcaggcgagggctgggcgggttattcaccagcatctgcggatcgccatcttccgcaatacgccctttatcgataaaaatcaggcgcgacgccactttttcggcgaagccgatttcgtgggtaacgataaccatggtcatgccttcttcggccagatcctgcatcactttcagtacttcatgacgcagttcagggtcaagcgcggaagtcggctcatcaaacagcatcattttgggtttaaccgccagcgcccgggcaatggccacgcgctgctgctgtccgcctgaaagctcagaaggatagtggtgcgcacgttccgcgaggcccactttctccagcaggtctttcgccagtttttccgccgccgctttattggcgccgcgaacgcgcagcgggccgaacatcacgttttccagcgccgtcaggtgcgggaacagataaaactgctggaacaccatcccggcttcctggcgaatcagccgctcgtcaaccttcgggtcgttgaccttcagaccgtcgacgatcaaatcgccgctggtaatctcttcaagtttgttaatacagcgcagcagggtcgatttaccggaaccggacggcccgataatcaccacgacttcgccctggttgatcttcagatcgatatcatgcagcaccttggttgggccaaaatgcttggaaacgtttttaaattcaatcacaggattttcatccttctttcaagacgacgcagaacaaagctcagcaccagggtgatgatcaggtagataaccgcaacggcgctccagatctccagcgcgcggaagttaccggcaataatttcctgaccctgacgggtcagttcggccacgccgatgacgataaacagcgaggtatctttgatgctgataatccactggttgcccagcggcggcagcatacggcgcagcgccagcggcaggatcacgtagcggatagtttcgcgacgagaaaggcccagcgcgaggccggcttcccggaagcctttatggatcgacagcaccgcgccgcgggtgatttccgcaatataggcgccggagttgatcataatagtcaccaccgccgccgagaacgggtcgatgcgtaaatcgctaaacgccatcggcagggcgaagtagatgaacatgacctgcaccacaattggggtgccgcggatgatttcgataaagaccagcgcgatgtggttggcaatccagccgccgaaacagcgggcgaaaccggccaccagaccgattatcagaccgccgaccaggccgaggaccgaaatccacagcgtcattttggcgccttccagtaaaattgggatggcgggccagatggcactccagtcaaactgcataatgtgttcctgttaccgtgtcgaaaacagaggaaaaccccctgagaaaactattcaggcctgctgacgggtagcccggagagctccaggtctaccagaccacagcaggcctggaagagagtatcgctaattattatttgggttcagtaccgaaccattttttataaatttcgttgtaagtgccgttctcacgcagcgttttcagcgcgccgttcactttttcacgcagctcgtcgctgcctttcgggaaggcgataccgtagttttgtgcttccagcgagtcgcctaccgctttgaacttgccgttacccgcagttttgatgaagtaaaggatgtttggcgtatcgtgcagaaccgcatcagcgcgaccggtacccagttccatataggcgttatcgatgttcgggaactggcgcagatctttggttttgatattggctttcgcgtaatcaacggagccggtgccgcccttcacggcaaccactttaccgttcagatctttgacatctttaatatcgttattattcgcgttaaccatgaccagcaggccgcttttgtagtagccgtcagagaagtcgatcgcttttttacgttcgtcggtgatggtgatccccgccagcgcgagatcgatgtttttggtctgcagcgccggaatgataccgctgaagtccattggcttcagggtgtagtcaagcttcagctctttcgcaatagcagcccacaggtcaacgtcgaaaccgacatacttatcgccctgtttaaattcgaacggtacaaacgccgtgtcggtcgcgacaaccagtgttttatcagcggcgtgagaagaaaccgcaaaagccagggtcagtgcagccagtgaaactttaaatacagacttcatagcatttccttttatatccacgggacgatcccctgcgagaacgagttgccttatgaaaaaatcatgccacttttacaacctgttgttttataacaagcaggaaggcgcctgttgcacaattttgataacggataacgttaaatgcaccgatatggggcaccgttttggtgcgtcataaaggcatcgcataacaagagcatttttaacgcaaaccctgatgttaaaacaatctcggcgtaacgattgtgtgaggtgattattacaattgatttacttttgcgcgtattttgtacattctcatgcactgaagtggtgcgcggcggggaagtggaaagaaaaaaaagccgccagcgtggctgacggcagttggccttactcgatattggcttcgatgaaccacaggaatttatccaggtcgcgggaagcggcggtaaagatatcagcggtatcttcatctttggcttcatcgatggctttacgcacatcgttggcgacgatcgcatagcggtcggccagctctttcagatggtcctggacgctatggatatccagcgggtagcttttcagcgggcttttgctgttaatgacctgagttgtacccagcgctacgccaccaagctgtacggcacgttctgccatcgtatcaaggtggtcgacgagcgcagtgcggaagccgtccagcatctcatgaacggcaataaagtttgcaccgcgcatattccagtgagcctgtttggtaatcaaagacaggtcaatgaactggatcacctggcgattcagcagctcaacggtcgctttcttcgcgctatcagcgacgtcgttacgggtatagagcagattcgttgctttagttttaaccagttttgcggtactcatagtgtcatatcctcttgatatttgtactcgtcatacttcaaattcgaattattcggagcgtctcatcccaataacttgcggaattaagtatagcaacggatttgagctttgcagcggcggtagtctctatcggtctgatagcgcagggctgttagtcaggaaaaatagtttataaattaaggagatgattgattttctcgtcaatcagctccttttcactagctgatgtcgaccttttgtatcttcgtttcccgacgcatcgtcagcgtggatcccatcgaggcaagaataatcgcccccagcgccagcgtttgggtcgcggttagcgtttcgccaagaaacaccattccggaaagcgcggcgagagccggctccatgctcatcagggtgccaaaggtcttgctgggcatgcgggtcaaggcaaccatttccagagagtagggcagcgcggtcgataaaatggcgatccccagtcccggcagcagcagcccccactgaaagagcgtatcgctggcctggatcatccccatcgggacgaagaccaccgcagcgatcagcgaccccatagcgaccgttgcggggccatgctcttcgccggcgcgctggccggtcagaatgtagaccgcccagcaggcgccagcgccgagggccagcagcgcgccaatgggatcgatctgcgccacgctttgccccagcggcagcagaaaccagagcccgagcaccgccagcgccacccagacgaagtcgagggggcgacgggagccaaagagcgccaccgccagggggccggtaaactccagcgcgacggcgacgcctagcggaatgcgttgaatcgataaatagaacaggtagttcatcgcaccgagcgacaggccgtagaagagcagcggcaggcgctgctccggggcaaagcgcaggcgccagggtttgaagataaccaccaggatgaaggtgccgagcgcgaggcgcagggcggtaacgcctggcgcacccaccagcgggaagagtgacttggccagcgaggcgccactctggatcgaaatcatggcaattaaaataaccagtatcggcaaccatgccggtactttgcgggacgagccgggcatcctttctcctgtcaattttgtcaaatgcggtaaaggttccagtgtaaatgaattaccccgcgccggttgagctaatgttgaaaaaaaggggtgtaaaagcagtacaatagcgcggggttgaagataatttcaccagaagattaggaataatctggatacacgtctggcgctttatgagccttaataggagtatatttgtaaaaaaggtttgttttccagtttgttatagaaacgtagaaacctttagttacatgaaaaagtacgttagacaatgtaaagtgaaaagagtttcccaaaagtttttgttatatttaatgcttaggacttattagaaacacatttgaggtggttatgaataaaattgcacgtttttcagcactggccgttgttctggctgcatccgtaggtaccactgctttcgctgcgacttctaccgttaccggtggctacgcgcagagcgacatgcagggtgaagcgaacaaagcaggcggtttcaacctgaagtaccgctacgagcaagacaacaacccgctgggtgttatcggttctttcacctacaccgaaaaagatcgttctgagtctggcgtttacaaaaaaggtcagtactacggcatcaccgcaggtccggcttaccgtctgaatgactgggcgagcatctacggcgtagtgggtgttggttacggtaaattccaggacaacagctacccgaacaaatctgacatgagcgactacggtttctcttacggtgctggtctgcagttcaacccgatcgaaaacgttgctctggacttctcctacgagcagtctcgcattcgtaacgttgacgttggcacctggattgctggcgtaggttaccgcttctaatcactccggtgatataaaaaatccgcctcaaggggcggattttttttgcctgcggttcacgcgactctgttaattgatggtaaacgcgtcggtacccagatgggtatagtccactttctttagctggaagttagtgatgtagatggggccggccttctgttccgagataaaacgatagcgcgggacaatctcctgagcgctgatgccggtccactgtgaaaagaagctgaggaagtcgttggcggaccgccgcgctttaatgaccttatgcgctttatcatcgctggagatcaccataaaggggacctggaaattctgctggtacttatcgtcgtgcgccagatactgcacctctttcccgcgctctttaaaagccagaccgtgatcggaaaaataggtcatcgagaaggtttcgcccgagttttgtagctgagtataaagatcgctcagcagcgtatcggtttgcgtcatggtgtagagatagcaggaggtctctttcgactgaacaaaaaccgcgtatttccctttggtgcggtcacaggcctgcggatgcgaacccatcaaatgcaggacaatcagctgcggctgggtgcgacgggtggcaagcacctgcgcggtcaactttaatagctgctcatcctgagtgtttttattggcctcgaaatcgccgttcttgaggaactgaacttcgtccgcgcgtttggcgatgctggcaattgccgtatcgtattcgccaatttgcccctgattcgagaaccaccaggtctgaaaaccggcgcggttggcgagggtgacaaagttatcctgaaactgcggtttatcatcgaccacccggttgagggttaaaccgagcgatttctgcgttgaaccgctggcggcaacgtagtcattgaacagatagccttttaccgagctggcgaacggggtgttgtcccagtggccgccaaaggcgccgagcgcatcgcgacgcgcgctctcgccgatcaccaccacatacagatgatatttgggctttaccgccagtacgtgccagctgtctttcatattcgccagctgcgccattcgcgcctgctcatccagcacttcattattatttaccaccacatctttaacgaagcgtacggcggggtagccggtgtcgataaccttaaagacgccgccccaggcgaggttttgcaccggctggagaaagaaaatagcggtgcagaacagcagccccagcgtctccattttcccccatcgcgccgatgcgtccggcttgcgccgtacggcaatcacgccgagcgcaaagataaacacggccagcagatagttgtaccacgggaaaatggtcaggatctcggtggactcttcgatgtttgtggcatgcagcgccagcagcgtgttgaaattgggcgcgccgtaggcctggccgaaaggataatacatggcagccagcagcgaataggcgccgatcgccactttttgcgcgcgcggaaagctgcgccacagcagatgcagcacgcaggtaaaagcaacggtatagagcaggctaaagtcgtagcccagcgccaggttaataaacagcgattgtaaaaagtagaatcctgtccatgggttcagtaccagtccgcgggcgaccagcgtttctttcagcgtgacattcatagtaaacaatcaaaaaaagagccatgtgcgtcccctggcatcaaggggtaaaacctgctggacagtgcgtgaagagggtctctgcgagccgcagtagtggcagggctgacaaaagatagggcttgcaaatgtcaaggtcaactatccataacggattgttttgggagaaagcttacaaaacttgaaaaaaagttgctgaagcgctgagtaatcagccagtgtggcagggaaatatgacaaaaaaatgaagcggcgtaccgcgacgccgcattagttgttgggtttatcctgctggggcttgccgttgatcagatcgcacagcataccgacaagcattaaccgtactttaaaaggagaatgggtaaacacgtttaaacacctcttgaattcattcatctcgacctcctgtaacttcgtccttcactccttgaaggatgtgtgtattacatacagatatagcacaggctatattttatagctatggctaaaacgttaattttttgttctctgtgcgcgatccattacaatagggatccttttatatgatgcttgatgcgtcacaggaatgaggaagcacaatgaaccgtcgcgcaggtaagccaataacaaaaaaagtgacgcagctagtgaatgtcgaagaacacgttgaggggtttcgtcaggtgcgcgaggcgcatcgtcgggagctgattgatgactacgtggagctgatctccgatctgattatggaggtgggggaagcccgtcaggtggacatggccgcgcgtcttggggtgtcgcagccaacggttgcgaaaatgttaaaacgactggccagcgtcgggctgatcgaacagatcccatggcgggggatctttttaaccccggaaggtgagaagctggcgcatgaaagccgcgaacgccaccagatcgtcgagaactttttactggtgatcggcgttagcccggaaattgcgcgtcgcgacgccgaaggcatggagcaccacgtcagcgaagagacgctggcgatgtttaaacagtttaccctcaagcaggggtcaccgggagaatgaacctcgtctttgttcagtcgctaatccgcgaccgttttttgcatctgctgctgatcgtcggcgttgttttaagcttttttgttccgtttgcccctgcaggctggctacacgccattgactggcatacgattatcacccttagcgggctgatgctactgaccaaaggtattgaactgagcggctattttgacgtaataggtcgcaaaatggcgcgccgctttgtgaccgagcgccagctggccatctttatggtgctggcggccgcgctgctatccacctttttaactaacgacgtggcgctgttcatcgtcgtgccgctcacgctgactctgaaaaaatggtgcgccatcccgacaagccgtctcatcatttttgaagcgctggcggtgaacgccgggtcgttgttaacgcccatcggtaacccgcaaaacattcttctctgggggcgctcgggcctctcctttccggcctttatcggccagatgctgccgctggcggcagcgacgatgctcaccctgctggcgctgtgctggttctgtttccccgcgaagcgtctcgactatcagagtagcgacagggcgccctcctggcggccaaagctggtctggagctgcctggcgttctatggggtctttttgaccgccttagagctgaagcaggagctgtggggactggcgctgatcgcgctgggttttttgctgctggcgcgggcggtcattatccacgtcgactggacgctgctgctggtcttcatggcgatgtttattgacgttcacctgttgacccagctaccggctctccagcatgcgcttaacggcgtcggccagctctcggcaggcggattgtggctgacgtcgattggcctgtcgcagtttatcagcaacgtcccggcgaccattttgctgctcaattacgttccaccatcggtgctgctggcctgggcggtaaacgtcggcgggttcggcctgctgccaggctctctggcaaacctgattgcgctgcgcatggctggcgatcgccgtatctggtggcgtttccatatctactctctgcccatgctgctgtgggccgcgctggtggggtacggattgctgcagctctgattttcagagaattgggcaagaaacggacagaaacgccacattcgcgctctccttttccggggtataactttattcacgatggtgaatcaccctgattgaaggagagtcctatgcgttatcaaaaactgggccataccggcctttttgtctctgagctgtgcctcggcaccatgaccttcggcggcgaaggcggcctgtgggggaaagtggggcagctgcgccaggcggaggcagagcagctggtgggcagcgcgctggatgcgggcatcaacttcatcgacaccgctgacgtctattcagaagggcgctcggaagagattaccggccaggcgctgaagaatctgaaagtgccgcgtgaaaacgtcgtcgtggcgaccaaagtgtttggcgaaaccggcaccgcaggcgtgaactcgcgcggcagttcgcgctatcacatcatcggcagcgtgaaggagagcctgcgtcgcctgcagctcgatcatatcgatctctatcaactccatggcttcgatccggcaaccccgatcgaagagacgctgtatgcgctggataacctggtgcagcacgggcacgtccgctatatcggcgtgtcgaactgggcggcatggcagatagtcaaagcgctgggcatttccgaacgtctggggctggcgcgttttgcctcgttgcaggcttactacacccttgccggacgggatctggagcgcgagctggtgccgatgatgcagagcgaaggcctgggcctgatggtctggagcccgctggcgggagggctgctcagcggtaagtacgatcgcgatgggcactcggcaagcggcggccgccgtcaggagtttgatttcccgccggtgaataaagctcgggcttttgactgcattgatgtgatgcgcgagattgccgatgcgaagggcgtttcggtggcgcaaatcgcgctggcctggctgctgcatcagccgacggtaagcagcgtgattattggcgcaaagcgcgctgagcagctcgccgataacctcgcggcgaccagcattgccctggatgatgatgaactggcgcggcttgacgcggtcagcgcgctgccgcgagagtatccgggctggatgctggagcgccagggcgaataccgccgcgaccagctcgcctagcagtaacttcctctcttgcacgccggatcgtctgtttcgcgatccggttttttatccgttgcgctcacaaaacgcgatcctggactttgcctgacgggagaatttcgtttatatgactagtcatgaaattaatatgactagtcataggtgcgagcgatgaacagaacactaccggcagattttttatggggtaactcggtttccagtatgcaaaccgaaggggcgtggaatgagggcgggaaggggatgtcggtttacgatatccgccagccggcggaatttgcgtccgactggaaggtggcaaccgactcgtaccaccgctaccgggaagacttcgacctgatgcaggatttgggcatgaactgctaccgcttccagattgcctggagccgcgtttgcccggaaggcgacggtgagttcaatgaagaaggtatcgccttttatcaccagtttattgatgaactgcttgcccgcggcattgagccgatgatctgcctctatcacttcgatatgccgctgtcgctggctgaacgctacaacggttttaccgaccgtcgggtgatggaagcctttattcgttacgggcagaagatgatcgactgctttggcgacaaggtgaagtggtggctgacctttaatgaacagaatctctaccacatgccggacgcgtttctgatttcaggctatatgcgcggcgagaagaccctgcgggagctgtatcagatccagcaccacgtgatgatggcccacgtacacctgacgcagtatctgcaccaggcgaagccgcagtgcctgatgggcggcatgctggcccacgcgctggtctatccggcgacctgcaaaccgcgcgatatcctttgcgcccagcagctcgatgagtttttaaaccagaacctgctgcgcgccttcgccggagagggctacagcccggaggtcatgcacgttgtcgcccgtgaaggctttgaggatatctaccgcgcagaggatctggcgctgatggcgcaggttaaaatcgactatctggcctttagctactacgccagcaaggcgctggatagcgacccgatcccgccgggcacgccggtgaaccactacatgcagtttggcgataaaaagaatgactttctgcaggccaccgagtggggctggcagattgacccgctgggctttcgcaccatcattacccgctactacaacgactggcgtctgccggtattcccgattgaaaacggcatcggggtgattgagtcctgggacggcgaaaatccggtcgctgacgattaccgcatcgcctatcatcgcgaccatatcaacgccatgaaagaggcgatgtttgaggacggcgcgcgggtgattggctatctgggctgggggttaatcgatattctcagttcgcagggcgatatgcgcaagcgctacggggttgtctacgtgaaccgtgaaaaccacgaccttaaggaccttaagcgcgtcccgaagaaaagctatgcctggctgaagcgggccatccgcagtcacggcgaagagatgtagcggcgcctcgcgcgggcagatggtatattctgcccgccagccactatcagacacgtaaaaggatccgggaatgacggccaaatatctgagtatcgcgcgggaaatcaaaaaacgtattatcagccggcagtatcccgccagcgcgccgttacccgaccagttcgccttagcggcggagttcagcaccagcaggatgaccatccagcaggcgatgcgccagctgattgtcgaaggccttatctacacccgtaaggggcagggaaccttcgtgcgcaaaaacttcctccagctttcgcagtgggagctgcccggcagcgactattttggcgccaccaaaacctgggagcatgtaggggaagtgaccagccgggtgattcgcttcgagctgcgttttccgtcggaaaaagagcaaagctcgttgctgattgacgccgatgccccggtctatgatttcgtccgcctgcggctgctcaacgaggaacccgtgtcgctggacctcaccgtgatgcccgttgcgctggtgcccggactgaataaaacgcatctcgaaagctcggtatttcgctacgtgcaggagacgctggggctgaagatgatgggatcgtatcgggtggtgcgggcgatgaaaccgcaggcgctggacagggagcatctcaactgcgaagcgagcgacccggtgctggaggtggagcaggtgatctatctggaggacggtacgccgctggagtatgcccattgccactatcgctacgaccacggcggaattattctggtcaataacggataaaaaaatggcgggcaccgggcccgccactctgcgcgatgcgttttagttcagacgcaccggcataccggaacggttctggatcgcctgatcgaccacgctctggtctacgtcagtctggctggtaatcgcctgtactgatttggtcaggttgatcggcacgatttcgccgccctggaactgctcttccgtggtggacagcgggttgtgaacttcaatgaagcggctgccgtcaggctcggtagtggcttttaccggctcatcgataaactctacgcgggtgccgaccggcacgttttcaaacaggaatttgatatcgtcgttacgcagacgcacgcagccgtggctgacgcgcaggccgatgccgaagttagcgttggtaccgtgaatagcgtacaggcggccgatatacagcgcgtacaggcccatcgggttatcagggccggcaggaacaacggccggcagcggttcaccggctgcggcatattcagcgtgcattttggcggtaggcgtccaggtcggaccggcttttttacgctcaactttcgtcacccagttgatcggcgtgtctttgcctaactggccgatgccgatcggcagcacgatgacggtgttggtgcctttcggatagtagtagaggcgcatttccgcgctgttgatgacgataccttcatgcacggtgtccggcaggatcagctgctgcgggatattcagcacggtgccgcctttcggcaggaaggtgtccacgcccgggttggcttccagcatgttggataaacccatctggtattcagcggcgaaatattccagcggctgcttgttgccttccggaatggtgatcacctggttctggccaatcagacggctgccgtcggtgggcagagggtaggttacagcagaagctgtgttgcaaaagcccacgatggcgaaggctgccgcgaagagtgttgataatttcataatctttatgtcgtgggcgatgttaatgccgcacaggcctttgtcagtttaaacaggaagtcgatgggagcgcattatatgtgctttccggcaaacaggtaaatgagatgtgtacgaaatcacatttttttcctgtgaccctgagtgtagcccgtcaacgcgggctctgcagcctgaaaacgggaggggattacccctccagaagccgcgactggagcgcttctcgcgcctgcggcgtgagctgatactctttctccagccaggcatcgacgctggcgtagcgttcgtcgatttgcgaaagtgcggcggcaaggtaggactcatgcaccgtcatcatttccgccaggttctgccggccgcggggggtcagcgcattaccgagggactggagcatgaaatcttcgacctgcgtcagcatgccctgggtaagcagatattcctccatgaccgtatgacgatcgcagccgagggcgaacagcgtcaacgcgcagccaacgccggtgcggtcttttcccaccgcgcagtgctgcagcagcgcgccgtcgaaaggctccatcagccaaccggccagctggcgataagcggcgttattgaacggcagctggcggtagagcgccagcataaactgctcgccgttaagggcgttcagggtggcggcgttgagctcggtgactttggcgttgacgtcgcgaacgtgcggattcgccggggcgttgaggtagtgagccgcttcgttcagcttatcggggctgcgattcacttcgcccgggtcgcgataatcaatcacccggctaagcgggatcgcgtccagatgggtgaggtcatctgccgtcatcatatgcagcgagccggagcggaataacttcccggtacgcacgcgacggccgtcggcggtacgctggccgcccaggtcacgaaagttgataccgccctgcagcgataagaaagccggatggcgggagtgtgtggtcataggttccttccagattaaggtaaaaaattacgcattaagcagtgtaaccgcgcaatatgacatgaccctaacacaggcgtcattgatgattttataacgccccgtgaaaagtgaagcatttgctggcataatgtctggttcatcacacttctcattctctattttcaggataaccccgtgctagtatccagcaacgtcaccatgcagttcggcagtaagccgctgttcgaaaatatttccgtcaaatttggcggcggcaaccgttacggcctgattggcgctaacggtagcggcaaatccacctttatgaagatcctcggcggcgatcttgagccgacgctgggcaacgtctccctcgatccgaacgagcgtatcggtaagctgcgtcaggatcagtttgcgtttgaagagttcagcgtgctggatacggtcattatgggccacggcgagctgtgggaagtgaagcaggagcgcgatcgcatctactccctggcggagatgagcgaagaagatggctacaaagtggctgacctggaagtgctgtacggcgagatggacggctactccgctgaagcgcgcgccggcgaactgctgctcggcgtcggcatcccggttgaacagcattacggcccgatgagcgaagtcgctcccggctggaagctgcgcgtgctgctggcgcaggcgctgttctctaacccggacattctgctgcttgatgaaccgacgaacaacctggacatcgacaccatccgctggctggagcagaccctcaacgatcgcgacagcaccatgatcatcatttcgcacgaccgtcacttcctgaatatggtctgtacccacatggcggatctggattacggcgagctgcgcgtttacccgggcaactacgatgagtacatgaccgcggcgacccaggcgcgcgaacgtctgctggcggacaacgccaagaaaaaagcgcagattgccgacctgcaatcattcgtcagccgctttagcgccaacgcctctaaatctcgccaggcgacctcgcgcgcccgtcagattgacaaaattaagctggacgaagtgaaagcgtccagccgtcagaacccgttcattcgctttgagcaggataagaagctgttccgtaacgccctggaagtggaagcgctggcgaaaggctttgataacggcccgctgtttaaaaacgtcaatctgctgctggaagtgggggagaagcttgccattctgggcgccaacggcgtgggtaaatccacgatgctgaaaaccctggtcggcgatctgacgcccgataacggtaccgttaaatggtctgagaacgcgcagattggctactacgcgcaggatcatgaatatgaatttgaaaacgatctgacggtattcgagtggatgagccagtggaagcaggaaagcgatgatgagcaggcggtgcgcagcatcctgggtcgtctgctgttcagccaggacgatatcaagaagccggcgaaagtgctctccggtggcgaaaaaggccgcatgctgttcggtaagctgatgatgcaaaaaccgaatatcctggtgatggatgaaccgaccaaccacctggatatggaatcgatcgaatcgctgaacatggcgctggagatgtatcagggcaccctgatctttgtttcccacgaccgtgagtttgtgagctcgctggcgacccgagtgattgaaattacgccggagcgcgttgtggacttcaccggtaactacgaagattatctgcgcagcaaaggtatcgaataatattcctgttgtctgtcccggattgcggcgctgctgcgccttatccgggctaccggcctgaagtcggcggtgaacctgtagcccgggcaaggcgcgttaagcgccgcccccgggagcagaggctgcgtggctgaattccccggaggcgatgctgcgcatctgtccgggctaccggcccgcagacggcgatgaatctgtagcccgggcaaggcgcgttaagcgccgcccccgggagcagaggctgcgtggctgaatttcccggaggcgatgctgcgcatctgtccgggctactggcccacagacggcggtgaacctgtagtccgggcaaggcgcgttaagcgccgcccccgggagcagaacgcaacgtggctgaattccccggaggcgatgctgcgcatctgtccgggctactggcccacagacggcgatgaatctgtagcccgggcaaggcgcgttaagcgccgcccccgggagcagaggctgcgtggctgaatttcccggaggcgatgctgcgcatctgtccgggctactggcccacagacggcggtgaacctgtagcccgggcaaggcgcgttaagcgccgcccccgggagcagaacgcaacgtggctgaactccccggaggcgatgctgcgcatctgtctggctaccggcccacagacggcggtgaacctgtagcccgggcaaggcgcgttagcgccgcccccgggagcagcgcacagcgtggcttaattccccggtggcagcgcgaaaaaggtgagggctacactcgccactcgctcctttcttcaccgttcaccagcagcctgcgtttttcccccgccggcaacgacaccttcagcgctttccacgccggacgataatcgccgcgcgcgttcacctgcaggttgatgctggcgctatcgcaaaccatttcccattctacccacagcgcatgaccattctggtagccccagctttcgccatcatcttcaaacagcaggccgcgacgggtccccacgcccttcagcgggaagagtttcagctcgcggcaatcgtctttttgcgcatcgacgtggcggatacgctcgctcagcggcaggcctgctccggcgcgaaccagcagcggcagtttttccagcggcgcatcaaggacgatccactggcctcccgcgaaccactggtggctatcaaagtcgtaccagccgtcctgattggccggcagccagacgcggcgctgacgcgcgccgggttcgacgacgctggcgaccagcagatcgcgacccagcaggaagtcgtcgcattcggcaaacgtctgcggatcgtgttcgtgatcgaggaaggtcggacgcagcatcggttcatcgtcggcgtgagcctgccacagcagcgtatagaggtacggcagcagacgatagcgcagctcaatggctgaacggatagccggcgtgacttccgggtacatccaggcttcgttgaccgtctggtcgtcattccacgagtgaatggtaaagcgcggatgcataacgccgttttgtacccagcgtacgaacagctccgggtccggtttatcgccagagaagccgccaacatcgtggccgacattgaacagcccggagaggctcattcccagccccatgcgggtgttatagcgcagcgtatcccagttggtacggttatcgccgctccaggtctggacgtagcgctgcatcccggcgcagccggagcgagagatcaggtacggtcgtttgtgcggcgcaaagcgctgctgagcctccagcgacgcgcgcatcatcagcagcggcatgaccgggcgaatatgtttaatggcaatttcctcgccaaacccgtaacagcgggcttcgccgtcccagacttcatactcgttattatcgttccacgtggagtcgatacccatctccagcagctgggttgtcacgccttcctgccaccaggcgacggtctgcgggttggtaaagtcaaggtgcgacccttcgtcatcccagaagctggagcgctcgggagcatccgcctgtgaatcgcggataaaaagcccgcgctccgcgacctcgttatagcgcggatggtcctgcagcaggcagggcttaatattggcggcgagcttcagtccggcatcgtggaaggcctggctcatcaccttcggctgcggcaccttatcgttgttccagttaaagacgtagcgcttgccgtcaatcgaggtatagccggaagagagctggaacgaatcgcacggaatggcgtgttcatcacacaggcggatgaagttcatcagctggttttgcgcatccggcgcgtcggtgtagtgcatcgtcgaaccgctgtagccgagactccatttcggtccgaagagcgttttgccggtcaggcgtacgaatgctttggtgatatccagtacccgtttgccggaaaaaagatagtaatcgatgtcgccggcttccgcctgccagcggcgataggcggtatggtaattatcgatttcgttgccgagatccagccagcagctgctcaggttgtcgtaaaacagaccgtagctgacatcgctacgctgcgcgatggtaaacggaatatgtttgtacagcgggtcggtgctcgccgcgttatagcccatggcgtcgaggttacgcatctcatagcgcttcccgtttcgctgcagatcgccggctttttcgcccagaccgtagaagcgttcgtctttgcgtcggctcaggtagtgggcaacgccgtcgccgtgcgcattcgccaggtaggcgctggtggggcggtcgttaaccagcggctgccactcgccgccctcatcgcgatagctccattccagccacagcggctggtggacggtgacgcgcagctgatcggtggcgatgctcagggtatcgctatgctccgtgagcttccaggcggggaggctaaagccgctcaaatcttcgcgcgggcgtccttcccacggcacgtcctgctggggagcgatactccaggtgcgatccagcgccagctgcccgtgccgctttagcagcacgcggaacatattctcttccagcacgtacagacacagggtgtgctggccgtctacgatcagctcaacgtggtggtccagccgttggtgcaaagtccagtttttcaaagtcttcattttttacatccactctcaggcgcgttttgcgcgacgttcagcaataaatgccaccaggaataccgcgccaatcaggtcaaagaaccccatggcgataaatagcgggttgaagccgattttgtcggcggtgacgccaatcagcagcgagaacagaaagctggcgatccaggcggcggagccgcgcatcccgttcacggtcgccatctgtcctttatcgaacgactccaccaccagcgcgctgagcatgcaggagatgatctggtggccgaagccgcctatcgaaatcagcacgatggtgatatagggatcgcgggtgatcgccacggtggcgagcgaaatcatcaggaaggcgccggtgacggagctggcgaccaccgagttcacccgcgaacagccgaaccagcgggtatacagtttggtcagatagccgctggcgacgctgccgaggtcggccgccagaaacggcagccaggcaaacatggcgatttgttttaaatccatgccgtgctctttcgccaggtagagcggtacccagaagctcagcaccgcccaggcgggctcagccataaaggccggaatggcgataccgtagaagcgcttgtttttcgatacggttttcagcgcggtaaagaagggcagtttgaccggcggcgcttcattgtcctgctggatcagcgccagctcagctttaccgaggttagggtgtttttccgggttatgatagaacgcccaccacagcacgacccacagcagcgccagcgcgccggtgaacatgaatgccccctgccagccgaacgaagcgtgtgcgaagtagataatcggcggcgccagcatggcgcccacggagaagccgacgcccgcccagcctgccgcgatcggccgctcggattttggaaaccactcacccagcgttttggcgttggctggcgtcgccgccgcctcagcgccgcccatgaaaaagcgcagaatcgccaggtgcagccagctccccgccccggcatgggcgatgcaggcgatggcccacagggtggcgcagatcataaagccgagcttgaggccaataacgtcgataagccagccgcagagcggctggaaaatggtgtacgccagctgaaaagcgccgactatccatgagtactgttcagtggtaatacccagggaggtttttaattccggggcgataatccccaacgaattacgcgtgatgtagttaacggtgacgccgagtaaaaacagcaccagcatccaccagcgcaggttcttcactatgcggcgcgatttactgaccgccatatcattattgaggccttggctcatagaactctccacgagacatgtagtagggaaaattgaccaacccgcttgctgagttgtcgctaaaattttctatttcgttgtttgttaaggttgatgtctcgacactattggttgactaatctcaaaggtgttggaccaattcaggctaagggagaatgcgagcgggcaatagcgacaattctgcaaatattttcatgggacgatccagatcgcagtatgacatcgccaaatcgcttaaaaatattcacattctcaatatgaaaattttttcatgagcaaagtagagcgcgatcacaaaatggacaaaaagctgaaagtgagcgaaatcgcggcgcgtaccgggctgtcggtgagcacggtatcgcgggtgctggcgggaaaagcaaataccagcgccagggctcgccagagggtactggattgcgcccgcgagctgggcgtgatggagggtatcgccgccgggcgaatgctgctcaataatctggtggtctttgcccctcagcgcgctttcgatgaacgcacggatatttactactatcgggtgattcaaagcatcaatagcgcccttatgccgcatgaggtacacctgcgctattgcgcgctggaagagaacgacagcgatgccaatttgtttttgcagcgcatgcatgaagcatcgacccaggccgcgattttactgggtatcgacgatccgcatattcacgatctggcggccgatctggcgaagccctgcgtgatgattaactgccacgacgcgggaatgcgtttaccctccgtcgcgccggatcatcggctgatcggccagttcgccgcccggtatctgtttgagatggggcatcaggcgatcatgaacgtgatgtgcctgcgccgctataccatggagctgcgtctgctgggcattaagcaggcgtggcgggcgcgtaatctccgtttcgttgacggcagggatttactcgctgtggccaacttcagcgccagggataccgaggaaaaagtcggggagtggctggatcagcgcggcgatggcccgctgccgacggcatttctggtgggcggtgattttatggcggcaggcacgatcgccgcattacaaaaacgcggtttgcgcgtcccgcaggatgtttccgtcatgagcatcgacggctttaacctggcggcgatccaggatgtaccgctaaccgccgtccacgtcccacgcgatgaattaggggtcgaagcggtacatttattacagcagagactgatccgtcccgatgcgccgcacggcgcgttactcctgcatgggacgctggcggtacgcgattcggtgcggcggatacgcgccggtaaccgccgtaccgccgttgaagcgaaggggctatatgatgattaattcgccatccccaacgcgcgcttaccgtggatatttaagtcatccagcgtaaagcggccttcccagtcgctttcataatcctcgcgggggaaatctcccggcgaagcgccgcgcgccagcgccgctttgaccttctgcgcgtaggcgaggtttttctcgcacattggcgcggcgggaatatacatcacgttgccccagccctgctgattttccaccggcgcgaccgagtggatcacgtcgcagtgccaccataccgaatcgcccgcattcagcgccggaatagagcttaaggctttgatcagcagcgggtgccatttttccgaaatcggcagcaccttgcccggcgcgacgccgcacagctcatcttccgggacatcgtcgagcagcggacgtagcagcacgtaagccatcgcttccgggatcggcaccacgtgcagcaggccctgatcggggatcatatcggagagcgcggtccacccctggaaggtgcggaacaccgagcatttggtggtgttgtcgaccgtatactcttcgacttcggtgcggtgcgccgcgtcccacgggtcgtaagcatcaatgttgccgttaaacacgtcggcaaacactttctgataggccggcagcagccagcgctccagggcgccggaatcggtatgcgcccccagtcctttcgaggtggttcccggcgggcggcggcgaatgcggtccgggtaaatgacgctgacgtccgggtcgaaccactgcttgccgtcgcggttaaacgtccacagacggttgaggaacgactgcacggcggccatttcatcgctctgtcgcgcctgcatctgcgcctgggaccagtaaatcggatagatttccgggcgcgaagcttccagcgatccgaaaaaggtatcgccgggacctttataaacgtcatcgaaatggttgcggtcgagatactcgagcattgcgttgtcccacgccagcgcctgttcgcgagaaaaatggcccttgataacggcgcagccgcgacgcttgatgagctcgcgctgggcttccgtgacctggccccgggcaatatcggcgaacgggatcgtcggccagacgtcctgaccgctggccttaagggagtcaatctcttccagacgcgcggcgatacgcgccgtcagccgatcgaacaccgcctgcacgtcgccaatttgcgcccgcagctcctgtttaatccggcggatggccgctttggggtcggcgggtaaagtttcacaggtatgggtaacagccataatgacctctcatctttcattcgaaagtaatttatcttacatatgataatttaagttaaaattaagttaatgcaagtttaaaattatgcggaggtgcacaaaacgggaagccggggcggtaaaccccgggtgtggcgttactcgttgaacggggcggtgtggtcgaggacggcctgaatgacgttcagcgcgccgtcgtggttgttatcatcggtggcaaaacgcgacaccgccttgatgctttcggcggcgttggccatcgcgaaagagtatttcaccagcttgagcatttccgtatcgttagcgctgtcgccaatggctacgcaggcctgcggcgagatgttccagcgcttaagcaagcggcttataccgttggctttatgcaggccggggataatcaaatcgacgaagccaaagccgctggtgaccggcttcatgatgccgtccagcgagacgtgcagtttgtcgataagctgcgggatttcgctatccggcaggttaagggaaaacttaaacagcgtgtcgtcgatgtcatgatagcggctaatgcgctgcaggcgatggtagtgctttgacatcagggtgacgaacgcctcgggcgcgcgctcgctgacgtaagcgctctcgaggccgcaggcgacgaagttgagctgcgggtctttcagcagttcaccgatgacgacctgggattcatgacgggtgagttcgccgtggaacagctgttgaccgcgttcgtaaaccagcgcgccgttctcggcaacaaaggagatttgatcacggatttccgggaaaaaagagatcagctggtagtactggttgccgctggcgaccacgaactcaataccctgctgctggagttgcgcaaactgcgcgagaaaacgcgagcggtcatactgcttggcgtcattgagaaaagttccgtccatatcggtgacgataactttaacggtcataacacatgctcctggcttaacttcgaccagtaacattctaattacaatgtgatggggagcacaaatttatttcgaatgaaagtttgcgttcacctctgtgcagcagaaaaccccggattgcggtgtaaacgccttacccgggctaccggcccgcaaacggcttcgaacctgtagcccggctaagcgtagcgcaagccgggggatgtgacttacagcgtatgctcggtacgggcgataatatcgtcctgtgcatccggcgacagggcggtaaagaacgccgagtatccggccacccggaccactaaatcacgatactggtctgggtgtttcttcgcttccagcagcgtctcgcgcgacacgatgttgtactgaatatgccagcctttatgcacctcgaagaaagtgcgcagcagcaccatcagtttctgcttatcggattcgttctccagcgtggccgggttcagcttctggttaagcagtacgccgccgaggattgagccggtcggcagtttgcccaccgagctgattaccgcggtcggcccgagatggtcggtgccggaggccgggctggccccttccgccagcggcgagtgcgctttacggccatccggcgtcgccatcgtttgggcgccaaacggcacgttggcggagatggacgaggtgccggcgtagtagttgccgccgatcgggccgcgaccgtagcgcgggttatgatacagcttcagctcgtcgatataggtctggtaggcgcgagccagcagcatatccacgctgtcttcatcgttgccgtatttcggcgcgccgttgattaagcgctggcgcagctgctcgtgggtcaggccttcgaagtcttcagccagcgcctttgccagctcctgctgaccaataacgccctgatcgaacaccagcttcttcaccgccgccaggctgttgccgaggttagcgatgccgacctgcagaccggaaacccagtcatacttcgcgccgccctgcttgatgctcttcgcgcgctcgatgcagtcatcgaccagcgccgagcagagaatatcgtgcacgttctcttccagcatggtgtcgaccacgtactcaatctcgatagatttgcgcgtgtagtagcggatctgcgtatcccagtcggccagaacctgttcaaagttgtcgaagttgccttttgacagcgcatgttcctgcggcaggaaaacctggccgctggtggcgtcgcggccgccttccagggttgtcagcatgacgcgggcaaagttgataaagctcatcccggtgcagcgatagccccatttaccgccgacggcggtttcgatgcagccgatagcggcatagtcgtacgcgtcctgcggctcaatccccagcttgataaattccgggatgacgatttcatcgttgttgaacgccggcatgccgaagccgcagcggatcacctgcacgcaggcgtcgaggaagtcgttgctcatgcccgcgtgatagcgcacgctgaggttaggttgagtcgaacgcagccgaccgcaggattccaggatggcgtaggagagcgggttcaccgcgtcctgcgcgttgccgtccaccagattctggccgccgatggtgacgttctggtacagcgggctaccggcggaagccttagagtgcgagccggagcgaattttgttcacttccagcagcttcagccagcagcagtgcagcagttcgatggcgtgttcgcgatccaatgattgtgccagctcaacgtcgcggcgatagtaagggtagagatactggtccatgcggccgaaagagaccgagtgaccgttggattcgatctgcagaatcagctggatgaaatagcacagctgcagcgcctgccagaaggttttcggcggctcgtgggcgataatatagcagttttcggctatcgccagcagctcgtcgcggcgggattcgcggctctccgtcgcggccatgctgcgcgccagcccggcatagcgcttacagtggtcgctgaccgcttccagcacgatatcaatggctttaaggaactgctcgccgtgcagatcttccagcacggtcaggttaatgcgcgaacggcgctcggcgactttcgcccgcatgccgtcgaggcctttttccagcagcagcggatagttaaccgcaaggtgagcgtcgccagaggtcatattgccttcggctttgataatgccggtcgccagcagcgctttttgctcgtcggtaaacatgccgtagcagcgatcctgtacggtttgaccgcgccaccacgggcacacttcgtggagcacgcgtttgttctcttcgctaacggcaaacccggcgccggggcgatcggcgaggtcgtcgatctctttttcgatccagctaacggtgtattccgggaagataggcgccgcgcgaacttcgctggcctggttgccgacgatcagttcatcgtgcttaatccagatcgtgcgttccgccaggtgatgagccagcgccagcgcgcggcgtaccgggatcggcttatccaggtgctgctgataggcttcggtatagtgcagggcgcgctcggtacaaaccggcggcttaacgatatgcaccagcgccattttatgcgcctgaatgcgcgggctcagagtatccagtttcaacgttgtcataaggttatcctcgtagagtcgccgttaaacctttgctctgagcatagcgctgcgcgaaggcgagcagctcgggtgcagcaagcggtttatccggagcggtatagggctgactgagtaattggtatttattcatgcctaaggtgtggtaaggcaggaagtggatctcgccaacctgtaaacggtcagcggcaaaatcggtaatggcggcaatatcgctttcgttggcgttaaagccctggatcagcggcacgcgaatgatgattttctttccggcctgcgcgacgcgctgcaggttatccagcacccggcgggcgctgccgtccgtccactgctgaaaaatcgcttcgttgacgtgcttgaggtcggcgagaaacaggtcgataaacggcaaagcgggctcgacgtatttccacggcacgtgcaggcaggtttcgaccgcggtgtggatccccgcgcggtggctggcctcaaacagctgtcgggccagttcgggattcataaacggctcgccgccggaaagcgtgacgccgccgccgctgcggtcgtaaaacggtttgtcgcgcagcaccgtagccataatctcttcgacgcttttctcttcgccgcacacggttaatgccgtggtcgggcagcagtcgcgcaatttgccgatatgcgcatcggtgagcttttcgcggtggataatcagaccgtccagcttgcgggtaatcacctccggcgcagcctgctggcagaggtcgcagccgtccaggcaaaggcgggcgtcatacagcaaatccgccgtgcgggcgcggctttccggattctggcaccagcggcagcccagcgaacaccctttgaggaagacaacagtgcggatccccgggccgtcatgggttgaataacgctgaatgttgaagatcatgattcaccctcttatttgcatatgaagattaaattactttcgaatgaaagttgtattgatataaatcaacaagcagaaagaggaaggagaatgaaggttaaaatgccgctgcgggtcacaaaacatccggcgacagcgccgccggaaaagggtcagggcgtaccgcacacctcgcagtgagggttacgcggcagcctcatttcacggaactggcagcgcatggcgtcgtacatgacgatttttcccgttgccgggctgccgtagcgggccagcagcttaatcgcttccatcgcctgcagcgaaccgatggtgccgaccagcggcgccatgacgccggcttcgacgcaggtgagggcgttttcgccaaacaggcggctcaggcagcggtagcagggttcatcttcctgatacgtaaagacgctgatttgcccttccatgcgaatcgccgcgccggagaccagcggcgttttatggcggaaacatccggcgttgagctggttacggatcgcgacgttgtcggtacagtcgagcaccagatcgtgggcggcgatttgctccgccagcgcctcgtcttccagccgcgcgttgagcgccgtgagctgaacgtggggattaatccgcgccagcgcggcgcgggcggagtcgaccttcggctggccgatggtgtcgtcgctgtgcagcgtctggcgctgaaggttggagagcgagacggtgtcgaaatcgagcagggttagcaggcccacgcctgccgccgccagatactgcgcggcggcgcagcccagcccaccgaggccgacgaccagcacgcgggaggctttcagctgctcctgaccgtcaaaatcgaaatcgcggagaataatctgccggttatagcgcagcatctccgcatcgctcagctccatgcccattacagccctccgaacagatgattaaacggctcgacttccacccattcgcccgcttccacgttgccgcgctcgcgttcgagaacgataaagcagttgccgaggctgaatgaactgaagatatgcgagccctggtgaccggtgctgctaaccaccagctcgccgtccggaccgcgctgcagcacgccgcgctgaaaatcgaggcggcccggcgatttcttcaggccggaggcggcgcgaacgcgcaggcgcatcggctgagcttgcccgacgttgccggacagcttcgccagcagcggctgaaccaattggtagaaggtcagcgttgcggaaaccgggttgccgggcaggccgcagaaccagctgtggttgagcttgccgaaagcgaaaggtttacccggcttaatcgccagcttccagaagccgatttcccccagctcttcgaggatcgctttggtgtagtccgcctcgccgacggaaacgccgccggagctaatcaccacgtcggcctgctggtcagcctgaataaaggcttcacgcagtttagccgggtcgtcgggaataatgccgaggttaatgacctcgcagcccagctcctgcagcatcaggtgcaccgccaggcggttggtatcgtaaatttgcccgtcggccagcggctggcccggcagctggagctcatcgccggtggagaagactgccacccgcactttacgtaccacctcaacctcggcaatccccagcgaggcgatgaccggcagctcggcggcggtcaggcgggtacctgcggggaagacgaccgcgccgtgggcgatgtcttcgccaagacgacgaatattctgcccgtttttcaccagggcgaggaagcggataccctcatcggtttgttcggcctgctcctgcatcaccaccgcgtcgcagccttccggcaccggcgcgccggtcataatgcggatacaggtgcccgcgggccagacgccgtcaaagggttgaccggcgaaggccttgccggccaccggcagcgctgcgccgtcggtgagatccgccaggcgcacggcgtagccgtccatcgccgagttatcaaaaccgggaacgttaagcggcgaaacgaggtcatgggcggtcacgcgcgaaaaggcctgcaacagcggtacggtatccgtcgcattcagcggcgtaatacgagtgagcatctgggtcagggctgtgtcgagcggcatcagtccggcggtaaaatccatgggtttctcctgcgggcaaacatcgaaaacgcctattatggcagaaaagagagacgggctataacccatctggcgacaagctttacatcaccgtccgctctttctatattcaaaaattgtataggacagtcagcacgataatgatatttatacactttatcgttaaggaatggcgcaatgggtaaggcggttatagcaattcacggcggggccggggcgattagccgcgcgcagatgacgccggcgcgcgagcgggagtacgtggcggcgctgtcggcgattgtcgatagtggacaaaaaatgctggctgccggggccagcgcgctggatacggtaaccgaagcggtccggctgctggaggagtgcccgttatttaacgccggtattggctccgtatttacccgcgatagccgccatgagctcgatgcctgcgtgatggatggttacagcttacaggcgggggccgtggccggggttcagcatttacgcaatccggtgctggcggcgcggctggtgctggagcaaagcccgcacgtgctgttgattggcgagggggcggaagcgtttgccgcttcccgcggtatggcgcgggtcgataacagcctgttttcgacttccgagcgtttgctgcagctgcgtcaggcgcaggagggcgacgatatcgtgctcgatcaccacgccgcgccgctggatgaacggcacaaaatgggcaccgtcggcgcggtcgcgatggatctggcgggcaacctcgcggcggcgacctccaccggcggcatgaccaataagctaccgggacgcgtcggcgacagcccgctgcccggggcgggctgctatgccaataacgccagcgtcgccgtttcctgtaccggtaccggcgaagtgtttatacgtacgctcgcggcctacgatatttcggcgctgatggagtatagccagctcagcctgcaggaggcctgcgaaagggtggtgatggagaaacttccggcgctgggcggcagcggcggcctgatcgccatcgacagagaaagcaacgtggcgctgccgtttaatagcgaaggcatgtaccgggcctggtgttatgcgggcgatacgcccacgattggtatttatcgcgaataagaggaaagggcgttgccgcatagtcaagaaatcgatgccgatgatgttctgcaggtgcgcggcctgaacgtcgtgttcaatcagcagcagcaggctttttccgccgtccgcgacctgtcgtttaccctgcggcgcggcgagacgctggcgattgtcggcgagtccggctccgggaagtcggtgacgtccctggcgctgatgcgcctgctcgaccaggcggtcagcgaagtgcgcagcgatgcgctgctgctgcgtcgtcgcagccggcaggtgattgagctgagcgaacagtctgaaaccgagatgcgcggcgtgcgcggcgcggatatggcgatgatcttccaggagccgatgacctcgctgaatccggtcttcaccatcggtgaacagattgccgaatctatccgcttacaccaggggctgaagcatgatgaggccctgcgcgaagcgaagaaaatgctcgatcaggtgcgcattccggaagcggaagccatgctctcgcgctatccgcatcagctttccggcgggatgcgtcagcgggtgatgatcgccatggcgctctcctgccgaccggctgtgctgattgccgatgaaccgaccaccgccctggacgtgactatccaggcgcagattttacagctgattgccgtcctgcaaaaagagatggcgatgggcgttatctttattacccacgatatgggcgtggtcgccgatatcgccgaccgcgtgctggtgatgtatcgcggcgaagcggtggaaaccggcagcgtggaggagattttccgcgccccgaagcacccgtatactcaggcgctgctggccgcggtgccgcggctgggggcaatgcgcggcacttcactgccgcgccgcttcccgctgttaaaccagagcccgtcgccggaggggcagaacaccgttgtgcccggggaaccgatcctgaaagttcgcgatctggtggcgcgcttcccgctgcgtagcggcattctcaaccgcattacccgcgaggtgcatgcggtcgaaaaggtcagctttgatttatggcccggcgaaaccctgagcctggtgggggagtccggctgcggtaaatcaacgaccggccgggcgctgctgcggctggtggaaactcagggcggcagcatcaccttcaacggccagcggattgatacgctgacgggcagtaagcttcaggcgctgcgccgcgatatccagtttatctttcaggacccctacgcctccctcgacccacggcaaacggtgggctattcgattatggaaccgctgcgcgtgcatcggctgctggagggcgatgccgctcgtgagcgggtcagctggctgctggaacgcgtcgggctggagccggagcatgcgtggcgctatccgcacgagttttccggcggccagcggcagcgcatctgtattgcccgcgcgctggcgctcaatccgaaagtagtgattgccgatgagtcggtatcggcgcttgatgtgtcgattcgcgcgcaaattatcaatctgatgctcgatctacagcgtgagatgggtatcgcatttctgtttatctcccatgacatggcggtggttgagcgcatcagccaccgcgtggcggtgatgtatcgcgggcgcattgtcgagatcggcccgcgccgcgccgtgtttgaaaacccgcagcacccctatacccgtaaactgatggccgccgttccggtggccgatcctgcgcatcgtcgtccgcagcgcgtgctgctctcagacgagctgccgggcaacatcttcaagcggggcgaagaggggatcagtacgccattacagcaggtgggaccggggcactttgttgccagagagcccgccgccgacgtgctggcgcgctaacaacgacaccaataatgcagcatttcaggagaacaacatgactcaacgcgtttcaggaaaatggctgttggcgctgggcgtcgcttcggcgctgacagcggctccggcctttgccgcaaaagatgtggtggtggcggtcggctctaactttacgaccctcgacccgtatgatgctaacgacacgctgtcgcaggccgtcgcgaagtcgttctatcaggggctgttcggccttgataaagagatgaaattgcaaaacgtgctggcggaaagctataccgtttccccggacggcctggtgtataccattaagctgcatccgggggtgaagttccaggacggaaccgagttcaatgccgaagcggttaaggcgaacctcgatcgcgccagcaatccggaaaatcatctcaagcgctataacctgtataaaaatatcgccagcaccgaggctgttgacccgacaacggtgaaaatcaccctcaaacaacctttctctgcgtttatcaatattctggcccacccggcgacggcgatgatttctccggcggcgctgaagaaatatggtaaagagattggtttccatccggttggcaccggcccgtaccagctcgacacctggaatcagaccgacttcgttaaagtgaagaagttcgccggttactggcagccggggctgccgaagctggactccatcacctggcgcccggtcgtggataacaatacccgcgcggcgatgctgcagaccggcgaagcgcagtttgcgttcccgatcccttacgagcaggcgccgctgctggcgaaaaacagcaagctggagctggtggccagcccgtcgatcatgcagcgctatatcagcatgaacgtgacgcagaagccgtttgataaccccaaagtgcgcgaggcgattaactacgccattaaccgtcaggcgctggtaaaagtcgcctttgcgggctatgccaccccggcgaccggcgtggtaccgccgtcaattgcctacgctgaaagctacagcgcctggccgtacgatccggcgaaggcccgcgagctgctgaaagaggcgggctatccgaatggatttagcaccacgctgtggtcgtcgcacaaccacagtacggcgcagaaagtgctgcagtttacccagcagcagctggcgcaggtgggcattaaggcgcagctgacggcgatggatgcgggccagcgcgcggcggaagtggaaggtaaagggcagaaagagagcggcgtacgcatgttctataccggctggtcggcgtcgaccggagaagcggactgggcgctgtcgccgctgttcgcgtcgcagaactggccgccgaccctgttcaatacggctttctatagcaatccccaggtggataaagacctcaacgacgcgctgaaaaccaccgatgcgcaggaaaaaacgcggctgtataaagacgcgcaggatactatctggaaagagtcgccgtgggtgccgctggtggtagagaaactggtctcggcgcacagtaaaaatctgaccggattctacatccagccggataccggatttagctttgaacaggcggatcttaagtagatagctgcgggtccccgggcgcaggctgcggggacttcgcgcaaggagaagcatgctcaattatgtgattaaacgcctgctggggctgatccccacgctgctgattgtggcggtgctggtgtttctgttcgtgcatatgctgcccggggacccggcgcggctgattgccgggccggaagccgatgctcaggtggtgggaatggtgcgccagcagctggggctggatcggccgctgcacgtgcagttctggcactatatcagcaatattgtgcagggggatttcggtacctcgatggcctcgcgtcgcccggtcagcagcgaaatcgccagccgtttcatgcccacgttctggttaacgctcgccagcatgagctgggcggtgatcttcggtatggcggcggggatcgtggcggcagtctggcgcaaccgctggccggatcgcctgggaatggcgctggcggtcaccggcatctcgttcccggcgttcgcgctcggcatgctgctgatgcaggtcttttccgttgagctgggctggctgccgacggtgggcgccgacagctggcgccactatattctgccttcgctgaccctgggcgcggcggtggcggcggtgatggcgcgctttacccgcgcctcgttcgtcgatgtcctgcatgaagattacatgcgtaccgcgcgggcgaaaggcgtgagcgaaacgctggtggtgctcaagcacggcctgcgcaatgcgatgattcctgtcgtcaccatgatgggcctgcagttcggttttttgctcggcggttcaatcgtggtggagaaggtctttaactggccaggcctcgggcgtctgctggtggactcggtggagatgcgcgactatccggtgattcaggcggaagtcctcctgttttcgctggagtttattcttattaatttagtggtggacgtgctgtatgccgccattaatccggctatcaggtacaagtaaggtgcgattgctcaactggagaagacaagcggctatcaacgcgatgccggggattaaacccgggcagatacgtaccccgtggcacgagttctggcggcggtttcgcggtcagccggtggcgatgggggcgggggtatttgttctgctgctgattgcggtggcgatcgtggcgccgtggattgcgccgttcgacgcggaaaactattttgattacgaccggctcaacgacggcccgtcaatgatgcactggttcggcgttgattcgctggggcgggatatctttagtcgggtgctggtcggcgcgcagatctcgctggccgccggggtactggcggtattcatcggcgcggctatcggcaccgtacttgggctactggccgggtattacgaaggctggtgggatcgcatcattatgcgtatctgcgacgtgctgttcgctttcccggggattttgctggcaattgcggtcgtggcggtaatggggagcgggatgtcgaacgtcatcatcgcggtggcgatcttttcgatcccggcctttgcgcgtctggtgcgcggcaataccctggtgcttaagcagcagacctttattgagtcggcgcgcagcatcggcgccagcgatgctaccatcctgtttaatcatatattgcccggaacggtatcatcgatagtggtctactttacgatgcgtatcggggtgtcgattatctccgctgccagcctgtcatttctggggcttggcgcgcagccgccgacgccggagtggggggcgatgctgaacgaggcgcgggcggatatggtgatggcgccgcacgtggcgctgttcccggcaatcgcgatttttctgacggtgctggcgtttaacctgctgggtgacggcctgcgcgatgcgctggatccgaggataaaagggtaggcgttcaaggattgtgcagcccggacaggtgtccgggaaagcactccgcacgttaatcctgtgcggttttgtcgcccggataaggcgcgcgagcgccttcatccgggataggttaagcggccggaattaaacccggctgccccacagatcgtattcgtcggcgtgttcgactttcacccgcacaacgtcgcccggtttgactttactctcaccgttcaggtagaccgcgccgtcgatttccggcgcatcggccatgctgcggccaattgccccttcttcatccacttcgtcgatcagcaccataatttcacgaccgactttctcctgcaggcgctcggcggagatctgctgctgcagctgcataaagcggttccagcgctcttctttcacctcttccggcacctgatccgccagttcgttggcggtcgcgccttccaccgggctgtacttgaagcagccgacgcggtcgaggcgggcttctttcaggaagtcgagcagcatctggaaatcgtcttccgtttcacccgggaagccgacgataaaggtcgagcgcagggtgagttccgggcagacttcgcgccactgcttgatgcgcgccagctggcggtcggcggagcccggacgcttcatcatcttgagaatacgcgggctggcgtgctgcagcggaatatcgaggtagggcagaattttgccttccgccatcagcgggatcacatcatcgacgtgcgggtacggatagacgtagtgcaggcgcacccagataccgagcttcgccagctcttcgcacaggctaaccatactggttttgaccggcataccgttgtggaaaccgctgcgatgtttgacgtcaacgccgtaggcggaggtgtcctgagagatcaccagcagctctttgacgccggcgtcggccaggcgtttggcttccgccagcacttcgccaatcggacggctgaccagatcgccgcgcattgacgggatgatgcagaaggtgcagcgatggttgcagccttcggaaatttttaagtaagcgtaatgacgcggcgtcagcttcacgccctgttccggcaccaggctgaggaacgggttgtgtttaggcttcggcgcgtagtggtggacgtgttccagcacctgttcatagctgtgcgggccggtaatttccagcaccttcggatgcacttcgcggatctgatcttcttttgcgcccaggcagccggtgacgatcactttgccgttttctttcaacgcttcgccaatcgcttccagcgactcctgcacggcgctatcgataaagccgcaggtgttaacgataaccatatcagcgttatcgtaggagggaaccacgtcatatccttcggtacgcagttcagtcaggatacgttctgagtccacgaggtttttcgggcagcccagagagacaaagccgatcttcggctgaggggtgacattgctcatagcttaaaaagtgttcaattattgggatggtcagggcagggattctacagagatcggcggaaagtttatactccttttcttgttagcctggcgatgtccgtgtttctttttatcgggatgattatccagattgttaatcaaaataagggagttattcatcttttatcttgcaacccggggaagtcggtttagagctggtttaacctgaagcggtaaaatagccgctgctttcagtctttatttttatcaggtttcccatgtttaaaaaattgggtggtttcgtctgcgcgctggccatgattggcgcgacgcccgtttatgccaacgagatggcgttatattcggtcaataccggttcctttgtttatcacatgaccggcaatcacggtcaatataacgaaaaattcaataaccaatttttttccgttgagcgcaagctgtcagcggattcaaagtacagcctgttggccggcactatgaagaatagctttgccgaccgctgcctctcgctaggggcgagaagagactggtacgcgggggcaagcggctggacgttcaagggcgtctatgcctataccggcgagtttttctttaaagcctttcgcgattgcggggactcaggcacctatcgaacggcgaagaaaatcaccggcgtcggtttctctccctatatttatcatggcctgcagtacaattttaccgattatttcggcgtggaaacgggcattatcgtcccggccatatttgtgatgagcgtgcagtggagcttccgctaattcgcccgaaagaggcttccgggcgaattttgattaatggctttgcgcaacgccagcgcctggcgcagcccccggcgcggtcggttctctattgtcgcgcagcgtaaataccgagatcagcgtaaacagcccggcgatgccgcccagaatataataggtatgcgcgaagccgatggtgtcgtacaaatacccggccagcggcgagtaaatcgcggtggcgatggaggcgacgaacagcaccagcaggtagaccgtcgaggagagcttgttgtcgaagttggcggcgataaatttaaacaccgacacaagaatcagcggtttttccagcgcatgcatcattttgaccgcgccgatccacaccgggcccagcggaatcgcggagccgacgatacgcaccgacatgattagtccggcgatgatcagcgcccatttcgcgccggtgcggttcacgaaccacggcatcaggcataaaaacagcgtctcgccgcatacctgaatggaggccaaaatgccgtaccagcgattgccttcttccggcgtcgggaactgcagagaaaagtactgggcaaactgctgatcgtaggtgtcgtagatttgcgtgacgaacagggtaaagatcagcagcatccagaactggccgttcttcgccagctccagggcatgcgaaactttcagcgcgctggttttctgcatttccgcttcggtcagctcgattttggtcagcataaaacagagcgcggcaatcacaatggcgatactcgccagccagaaggcgaggttcggattgctgtcgatatacttgccgacgatccacgcggcggcggcccagcctaacgatccccacattcttacccggccatattcgaactggtagcgccgcgaaattttatcaatatacgaatcaatcaccccgcagccggagttaaaaatcatccccaggtataccccgccaagcagcgcacccagccagaagctgtgcaccagcagcggcgcgtacaaataaataaagaacgggcctaccggtagcagcatggcgaccaggatccagatcagccgctttttcaggccgaacttatcggaaataaagccgaagaagggctgcatcagcagggcaataaaggcgttgaccgagtagagcaggccggttttcgttgcgctaatcccgaggtgctgagtcgtccagatcacaaagaacgccatggtcgaggaccaggcgaagagatagaggaaatcgaaaagactcaacaagatatagtttcttttgccgggcgtcatcatttcagttccttcaagcgatagagataaaggttacaaacaggatcgatatgcctgccgttcttattgaatgttatacgtaatacattttatttgatgatatgacacccggcggcattttctggcaacgtgaattgcgctaatttgtgatcattactgcaataaatgattttatatcccagggttggaatttttacttttatgagaacgtataacatttttggctttcaggagatgatgtcgcaggtggggattttaagcttcgttgtaacattgtaaaggatgttaatgccctgagaattattgatctgcctcatcgttttgtacaaaaaatgaccatattatgattgtggtaaaggacgtcagaggaggaaccgcgatgagcgttgacagactatatcgtaacctgatgaataagctgattaatgccaacattgatctcgatgcttatttacagctgcgtaaagcaaaaggctatatgtcagtcagcgaaaacgaccatctacgtgataacttgtttgaactgtgccatgaaatgcgtcaacacgcgccgcgcctgcagcacgtcgttgcgccggaggaaaaggatgccctgcggctggcgggcgaagccgtcgcttccgcggcggtgtgcctgctgagcggacatcatgactgcccgtcctacatcgctgtcgacgtagataagctggaaagctgcctggcggtattgcggctaaatattcataaattgaatgattctaagcccattactcatgcctgagatcggggggagcctgctccccccgattaatgttatgtaaaaatcccttcccgttttcccacgctggctacccttatcgcattgctgacaaaaggagtatgccatgcgccagaccattaccctgatgatagcccttaccgcactgttgctgcctgcggctgcccttgccgcccgggagcgcgtagaggtgctgcagaaccagcttgaacacccgtgggcgctggcctttcttccggacgatcggggcattctgatgaccttgcgcggcggtgagctccggctgtggcagcggggaaaaggcctcgcgcctgcgatctcgggcgtaccgcaggtctgggccaacgggcagggggggctgcttgacgtggcgctggccccggatttcgcccagtcgcgccgggtctggctaagctacgccgaaggcgggagtgacgacaaggccgggaccgccgtaggctacggccgactgagcgaggatctccagcgcctggaaaacttccaggtggttttccgccagcagccgaagctctcaaccggcaaccattttggcgggcggctggtgttcgacggccgcggttatttgtttatcggtctcggggagaataaccagcgttcgaccgctcaggatctcgataagctgcagggaaaagtggtgcggctaacggctgatggcaaggtcccggaggataatccttttgtcggccaggctggcgtcaggccggaaatctggtcttacggtattcgcaacccccaggggatggcgatgaacccgtggagcgatacgctgtggttaaatgaacacggcccgcgcggcggggatgagatcaacctggtgcaaaaagggaaaaactacggctggccgctggcgacgcacggcattaactatagcggcctgccgatcccggaggccaaaggcaaaacgctggagggaaccgaagcgccgctgtttgtctgggcgaagtcgccagcggtgagcggtatggcgttttacaacgcgccgaccttcccgcagtggcagcacaggctctttatcggcgcgctgaaggatacgtcgctgattgtcctcaaggttgacggcaataaggtgacggaacaggagcggattctgggcgatcgcggtaaacgtatccgcgatgtgcgcgttggacccgatggctatctgtatgtcttaaccgacgaatccaacggcgagctgctgagggtgagcccggcgggctaatatcaggtgaccgggatcatcaccacgttgcgccaggcctggcgctggttaatctgctgataccagcgctgcaggtgcgggcgcggttgccaggttttcacggtctccagcaggttataaatgaacggcgcgacggcgatatcgccgaggccgaaggcgtcgcctgatagccactgatggcgcgacagttcgtcatcgagaatggcgaacagggtctcgcaggtggcaataccggcttcaatcgcggcggggtcgcgtttatccggcggggttctcaccagccccattaaaatcggccgatgggccggcgagagcgaaccgttggcccagtccatccatttctctccctgagcgcgttcggcgggcgactccacccacaggcgattctgaccatactgcgcggccagatagcggataatggtgtttgattcccagagcacgatatcggtcgtctcatctttcaatagcggtaccagcccattgggattcatggccagataggccggatcgtgattcagaccgaactccaggcctgccagaatttgctgatacgggaggtcgagttcttccagcacccagcgcactttcttcacattggtcgagttatttctgccccacagcgtaatcatatccgctcctgctttttatttcgccgccgttgcggcgtagtgagcattcatgttggaataaagttaatattccggcaagtgattttattttgctgaaattaaacgctttttatacccactaccttgcgtttggggcacccttgggacagagcgttagaaaaactactattcagcatttccacctggttacggtccatctctccgatccacttcgagtaaatctcataaaccatctttgcattctcgtggcccatctgtcctgcgatgaaagacggattagctcctgcagttaaaagccagcatgcgaacgtgtggcgggactggtaagggcgtctgctcctgattcccgccttctttaatcccgcctcccaactataccccagagactgagagccataatacttcgtttccccgcgccagtttttgggcgggataaacacgaaccgcagtttttgttgttcagttaaaccatgttcgcggtgatggaaagtgatttcagttttgcttaatgcgccagttagcttgaattgttcgcgtagagcattcagcgcaggttcaagtagggttacagttctgatccccgcttcggttttgggaggcacaaacaggccctcattcgtctggttacgcctgacgtgaagctcacccttatcaaggtccacatcctcccaggctaaagctgttagctctccatgccgaaggccagtaaagatagctgtagtccagagcaaagcataccgaggagataacgtttttatgaaaccttcgtactcactctggagaagcggatccgggtctctcctggagcgcttaagcatctttataccttcgtgaggggtatgctcgataaagccgctcaggttcgccagtttgagcaacgcagtcaggttgttcatcaggccgttgacagtggatacagcgcgaccttttcttttaagccagggagcatgatcgctaaaggtgttaccagttaacagcgcgttcctgtaattcaacaggtcggtatgctgaatatccgcaatatgcgtattacttccgacgatagcgcaaagtgttgctatacgtgattctgcgcctctgtatgaggcagctgacacctcaagctttttggcatcaagataaactttgcataattcaccgaaggttttaattttttgtgtcgtggtgaattttttaagcgcctttgattcagggaagtgctctgcatagtcaaatttaccttgctgaatctcactcataattaaagcgcggagattgccagctttttttatattgctatttgatacagtccagccccgcaaaacttcgcggcaacgtatgccgcgatatagaaagctaatccttattcctttcccatgcagctctacgccagcaggcatattcattaagtttccccgacaagcctattaatcctggtgtagttgtagagaagtgtcgcccttccttctgaagcttttggatcgggtgggtgcttcttataatgaatgccctcgatccatcgtccctcccggtaagatttaatttgccggggagtcatatacatcttcgctacaattcccttttccatcacccattcatcttcttgagtaatatcggccataaataacctcatggccgggaaactataatcagctccccggtttaatgttgattattggaaatcattcagtttctacagtcgtatcatgctatttatgcgatagagcctttcacagccagaaacgtacccatcgctttatcaacaatcttcgcgttgtggtatttgctgattgcccaggtgatagcgaacagaatccagcggaagtggctggtatacgttttaaaggtcaggccgtcgcatatatcccatgcgctaaacctttcaggccaatcagcgtcataaacggcgttgtaagcctcaaagtcgttgttaaactcagcacgacataattcacgaacaatttctcgcacccttgctttatcgctatctggcgtatcgtcatcgtcgtcccagtcttcatcctcttcttgttctgagccttcctcaccctccaggtaatcactaagcgactctttcaggcttttgcaaaacgcttcgtggttgtactctttcgccagcatttcgcgcgccgaacagcccgcaccagcttccagcttttcagaccaataatgggtattgattccaccttcccaggcaccaaaaaagtcgaacatgtccgctattcgggaaaaggtccaggttcccatgtcacccgtcacagtcaaatagccaggccaggtaattacgtcatagtagtaattggacgttcccggctgctgcattcgaaggtggcgatacaggccattgtcacggatgatttccaggcggtgaaatgctgtatccatcaaaaatcgagagtcaatttcaaaaaagctcatgctgtaccttcctttacgaagattatccaatgggtcttatcgttctttccggtacgctggccgatcgctggtttttcgtcagtaaacgctagaatctggctaaccggtatctgggtttcattccatttaaagataagaacgccgtgtggccacaacacgcggaatgcctctttgaatccggcgcggatatcggcgcgccacgtttttttattcaggcgcccgtattttttccccatccaagcggtttgtccgacgcgctcaagatgtggcgggtcaaacacaacaaccggaaatgaggcatcagcgaacggcagcgcacggaagtcagcaacgaggtcaggacagataaccagacggcggccgtcgcacagcttgtgctcttcagctcgaatgtcggcaaataccgcgcgagtatctcgtttgttgaaccagaacatgcgggagccacagcacatgtcgagaatggttttctcaatcattccaggcctccagctcgttctgaatctcctcgtcgatttcgtcgttggtagcttcttcgtccaggtagtcacgcgcctctttcagatactgttcatggcgctcacgataccaggctgaaaattctggtgaccagccgttcagctcaccgtcatagtcaaccttagcgttacgttcagccatgctctcgaccatgctgtaagctgtggtaagcgccgcttcgcggatgtatccattgaggtcactctttcgccagaacggattcaccttagaatcgcagataggtttaaactccacttcccaccgtctgatgcagcgtgcgtttagtgatttgctcataccaccaccttatgcgcttccgcatcgaacttcctaccctgataccagccgcgacgcagccagcgacggatggtgcgcatagcctttgcatcaccacgtacgggctcagggaaacccccgtatttcacagttttaggcccatgcttgcgctctgactgcatcattccgcactcaatgatgtgatcgcggtagaaggccaaccactgcttgcgattacagacagggcaaggaatgtcaccaccattcgtcagcatgccatcttcgtatgcgtcgcaatcccacagatatccatcgcagcaaaggctatccgggtaatgcgcaccaaattcataaccttgatatccgcagctcatttgtcatcctccagtaccagttctgtgtcgtcaggaacctgaatcgtgagctcaacgctatagccgcgttcgtgctgggtgaaagatgtggaccatgctggaagtggcgtttcttctttaacctggcccacgccaatagcccagcagccttcgtctgtatagcaggcaataacgagcatctcaccttcagcggatttgaggtgataaacgcctggattactgtatatgcagatttcttccctgatagcgccttcgcattcgaaaaggtcatcactggcaccgtaaaatttaagttctttcatatttagtcctccggttatttattccacgctgctggtcgtaattgaaagcttgctggtcttgaaggtagtgttttgcgaactaaagactgtgttgcctttaattggtctttctttatttccctttcgttacaggtaggacagtaatatgccactttgcgataagcgcctcggccagaggggcgatactgcaactcttcgcgtgcaaaggagccgccgcagctgtagcagtggagtgtttcggtttccatatttattcctgtattaaggtgtgtggatacctgtcatttaaggcattaattcatttattcgataattaaaatgaaacttcggtgtttactttatattgacctgtaagcaagtcagcatcgacggaaattaaatctccgtacaggtcataatttaaaacaacatcacgaaattgaagtcctgaaagcgcatccgtacgaccacaaaacatatggtcttcttcgtgctttgctgcttcatgaatatcttttattgacgccatggcatcagaccacataccactgttaccaataaattgcgcaatagcgagtttgctttgagctgctttaaccatcgggttgctttgcagaaaattagccattaaacacccccgtaacatgcagaattttgataatggtcgctgcccaggcaacaaggcagatggccagaacaataaccagtgaacgaatgccatttctgctcatactccaccccagcactgaacgcttaccgatgcgaccgcaaataaaaatggaacaaccttcaaccagaaccggcgccatgctggtttgtcttcgtctcgaatcatctcctttccctcacgcgttttgagtacctaacaggccttgcaatgcagtgccgggtgcctcccggtgataccagccagttaacaactggtaccgacagcttcttttccaccccactcttttcagaaacgagtgttaccgcttaactgtgccgcatgcgcatagccgcattcactgcattgcaaggcctgttgtttgtgcctgtcttttaaccatttcaggctcaacggaatccgtgaatttttattgcgacttaagcttgtaacgcagagcaatagcttcttggcgggcgtcgccttcaatcttttgcagtagcttttccagattacgcagagcagtgtcgtaactgtccaactggtcatccataacgatgccgcagggtttcattgcctcgcgcatatcatccagtgatgaacggatttcattaacgctatggaaaatgtttacggatcgctcgataactatgttggcatttgagtagctaacggccagtttcaaagtctcttcagacatgagcattaccttattttgttgacccttatcgccgggtagcggaacgttttcttcttgccagtcactgcgcggtgattggtttgatggagtgaagttaagtcaactcaacaataaaatcaagccttgtttgttgattaaacttaacaatgatggcgtgagaaaataactaattgaataattagttattttttatttgttctcttgcgggctttgaggagttcttcgaagagggtattgaaattttcgactcttgctctgagggtttccaattgagctgattgctctgactctggtagggagcgatacaaatcaactaactctctttcatcgtcagagagtttatcttgctcgattaacgctaatgggtcgcctggggtctgatctgaatcgccgaacagaatccacgtgggtgtgcactgcaaggcgcgagacagagcgtgtaaatttttccccgtaggctcagtgttatcactttcccacagcgaaatcgtggcataggaaacccccgcagctttgcccaactctcgctgcgtcattttgatttcttttcggcgctgaagtatgcgctgacctaaagtcttctcgctcattgttgagttatcttaattcttcttgacttgagcatcctaagcaaattatcttgtttaaagttcttaacaagagagtggaaaaaatgctcaaacaggatgcaataaatttttttggttctaagacccggttagccagagctgcaggggttgaaagatccgcagtctcccagtggggtctcttggttccagaggggcgcgcacaaagattagtcgacgcctcatccggcaagctgacatacgacaaagatatttacgaccaatatcgtaacgaaaaacgttctggtgaggtgaatcatgaaaatcaggcatgagcgcattcgcgaggccatgaatgcctgggcgctttatccaggcggccgtaaaacgcctgtatcggcgattgtcgacgcttacttctccatgggtatgactgcaccagagttgtacgacgacagccaccctgacgcacttagccgcaatatccagaagatttaccgctgggttgaaagtgattcgcctgcatcaatcgaaaaaattgcgcagcttctccccgcgattgaacgtgctatgccgccgttactactggcgcgggtgcgtagttactactctgaaactttccgcgaacttcttcaccgcaaacaacgggtggacgacgaaatggaagcgctgttcggcgcaatgattgctatctctgaccggattgctgatggcggctcttccggtaacacgctgattcactaagcgaggttcaaccatgcgtaaccagtctgctgctgaattgattgctcgcctgaaacgagcgtatccggcgtatgagccgtctgaaagagattgtgcaggcactggcatccctaaggccggttctcgcttccagcacaggcacaaaggccacatggtgacggtactcacagcgacagagaaagaagtttcctaccgcaaagcctgcggggctattggctgggtaggattgagagagtttttacggctacacaatgaggtttcggaatgaacaatcaggtttttgaaattgttcaggccatgtcggggcaggggaactgcataacgatccccggaccgtatctggatttctttgcaggagacaggcaacagcatttgctggcggccattctcaatcagctggtgttctggtcgggcaagtcgagtctggaaaatggctggttttacaaagagcacgcagcgcttgccaaagagattcgcgccaaagatggcgacgtggtcagaaaagcaatgttcaagattacagagcagtacctggcgggggttattgaggaagagttacggcaggtaagcggcactccgaagaagcattatcgggtcgatcaggaggcgctaatcgccaaaatattcccgcaagggggaaattcaaataacccattgaaaaatatggatacggcccaagagccgaatggaaacggcttaagagccgaatcgaagcaagtgattgaaagtgatggaaacggctctcaagccgaatgcattcgtcccaagagccgaatggaaacggcccaagagccgaatcctggaaacggctctcaagccgaatcctatctctatacagatcttaaaaacagatcactacatacagatcataaaaaccacgcgggagagattcttcctgtggataactttgcagagtcaggacgtgaaccggtcatcccggaagcaaacattcctgacgctaccgaagacagtaacctggctaccgatgatgacttcgatctcgcgatgtggttctggtcgaccatcatcgagatgtacgaacgcgccgccgaatttgacggctctctggcaagaccgagagaaccgaactttgttggatgggctaacgaggttcgcatgcttcgccaggaacatggctgcagccacgaccaaatccgcaccatgattgagcgcattcagcgcgatcagttctggtgcccaaaagttcaaaccatgaagacattacgtaacaaatggcctgagctggcgctgaagctgtgcccggtaaaccttgctgtaggcggaaacctcggatttagcggcaaagttcaggcagatattccaaagggtttcaggggctaaggagttttttcaatgaaaacaactaaatccaagaaaacacaatacagcggtgaaatcacgatgatcgaatttctcaaggccaatcctgatttgaccaccagagaaatcgccgttgcactgggtcgcggtatgtcgtcggtcggtaatcagcttcgccagttacacggaacaggtcagattacccaaagcggcatgcggaatggcgcggcaatgtggtgctttaacgatatgccgtttggctgcgcgaaccggcttcgggcgaagtttgaaagccttctgagggagtgtcgcggggtcgctcaatgaaattacagaaatgccctgattgcggcgcgttacctgagtaccactggaaagattatatgtttggctcttgctccggcgcactgaaatgcccctttgaccattaccgagtccagcaaagctactgggctggtggaaagaacaaagccaggcatgctctggaacaaaaatgggctgaggcggttaataaaaacgaggttaaaaatggctaagaattcaatcgacgcatacggtgccagcggcaagacaaacgttctgatgtttgagccggaaaatctgcatattgtcactgacaaggctcatccgctttacgatgaacgtatttacttacctctcagtgaagccatggtgctgaacatcatagaccagggggttcttgagccgattattgtctggaaagacccggaaacggggctgtcctgcgtggttgatggccgtcagcgtgtccgccataccctggaagctaacgggcgtctggcaaaagagggaaaaaccccactgctggttccggcagtcactaaacgcggttcagctgtacgcatggctcaggcgatggtcagcgcaaacgaaatccgtcaggccgatacaccgctgggcagagccaaaaagatggctgatgcgctggagcgcgggcacgatgaggacgatttagcactgatgtttggcgtgagtgtccagacagtacgcgcaacgctgtcgctactggatgccacccaggcagttcgcgatgcagttgagtctggaattgtcaccgttagccaagcccgtcagctggcatcacttaaacctgaagagcagcgggagaaggtctctgaaatcgaagcggcaactgctggcacaaccggccatgaaaaagcgcgtcgtcagcgtcaggttctcggcgataagaaaccgcgccttaaaactcgcaaagaaatcactaaagccctcgaaggtgccagcggtgaatacgctgatgctctgcgctgggtactcggggaggctgtatgagcaacgacggattaacacttaaccaactggcagagcgcaacgcagtattggtcactgaggtcgagaaattacgtgctgagcgtgatcagctggctgcggagaatgtggcgctgaaggctggtcgcagttatttcatgtacagcgatgatgcagggtttgagacgcactcgactcgcgaagaggcaatcaaagcagctgaagagatgattgatgattatcgcggggatgctggcgatggatttccggaggaagcaggtacaacccgctggggcgtgattatccaacaggccactgagtgtgattacgaaaaaccgtcagctgaaaacgggtggatgggctcgtgcgattacagattgctgcctgaaacccccgccaccgatcgcatcgtagccgggattaaggctgatggggtggagctgttcgcggcagagcagcgaggcgtagcggagcgtttgaaaaaacgcggcggtgatgtggtgatgagcagtattaaattctgtttagaaagtgcagaagaggcagaagtgttcgcccagcagctgcgcgacggaggtaacggtgaatgagttggctcttttcgcaggcgctggcggaggaatactcggcggacacctccttggctggcgaacagtttgcgcagttgaacgtgatgcctacgccgcacaagttctcgcgcaacgacaaaacgatggaattctccagcctttcccgatttggtctgacgtgtgcagttttgacggaaaaccatggcgaggaattgttgacatcgtttctggcgggtttccgtgccaggacatcagtgctaacggcaatggagccggcatcaatggaaaacgctccggattatggtctgaaatggcgcgaatcgtcagtgaggtacgacctcaattcgtctgcgtggaaaattctccacgactcagaggaaaaggtcttgccgtggtcatcagtgaccttgccgaaatggggtatggctgccaatggtttcgtgtttcagcatccaactgcggagcgccccatgaaagagacaggatgtggattgtggccaactgccaaagcgtccattcgcggggactgtccgagcgagcgtttgcgcagaactccagatcttccaagtgcgataaaaatgcgcccacttccggatgggagtgcaccgccccaggatggtcagctgaacccggattgggtcgagtggttcatgggctggcccatcgggtggacagaattaaagcccttggcaatggacaggttccgcgagtggcagcaacagcattctctttgctgtgtgaaaaatgatgaacaggagcgtgcagcatgactgatatcaccgaactggcgcagagcatgaagcgtcgagcagcatcagcaaatgagtttggcgaaagcctgtacgtaaaagccgataatgttctcgctgtggtagaggcgctggagcttaaggaagagcagcgagcaaactggttccacatggcgcagaagttggggaataacttggatgcggctgaaaagcgcatcgctgagctggagcgcgaaccggcagcacgcatggtcgtaacccctactatctggaagcattatactgccgcccaaactgcgattatttacgagaaagccatgacagatgcaggcattaagtggagaagtattgatgaacgcttaacgcatgaagagttagaatcactatacttggcgatgaaatcacacttcgaggttatggctgaatccgcttcagaggctgaggttattgaatgcagccagatagtaagagcattgtgtgagttacaggaacgccgcaccgcaatgctcgcagtcgctccacaggaggtgaaatgatggactctttactggaagacacctgcaagcgtgtcattgagctggaaggtctgctgctggtggtcgttgtataaacccgctgttgcggtttttttctttctgttagcacgcttcggcaactttgtgccgccaccgttcgttgaggtactggtgatgggcaattttcctgagttatgtcagaaaagggacgcagccgcatgatgtattaaaaagctgagattgcaactgtatctgaaattgttgaattaaattcatgtggtgcgcttattaatatgtgctttagtttaaatgatttggaaacttctcaatttgaaaatagttgaatctttactccattaaagctgctattgtctcctgtaaaatggaaccatcaagtaccggagccttctgttacttgatttttaagtcttttacttagggatgactgaggatttatcatggcaaatgattcacgaggaaatgaggtggttttcaaccgcgcatatctaaacttgtgctctaagaataagaatttaagtacattggttatagccagagagtttaaggatgataatattgttggatgtttttcttttggccttaaaaaactaatcgatattgagtcaaagtgtttgtttttgcgctataagtacccatggccagattttgaaattgaactggttaaaaataaaggcggtgattacgagttcatgctttttcataatgattttcttaaaggtagtgaggtttaagttagttataacgatttttttaatcaaatcggatttaatttaattgtttatgttagacattttttaccttgagcttgtctaaggataacattcgaagagtgtcgcacgcttgcccgactactttaatcgaacagttttgatgtcactgctcgattaaatttggccattacgtaatcatataaggtctcgtcaatatgacttgttttaccactcatgagttgggcgatttttgtttactgtgacctaagactctgtctctctttagagaacatgactaaaaaactccatagattcaacccgctacggtgggttttgttttcccatgactgataaaaattaacgttttgtgctcttaagatattgctcattcagtaagttaggtgtactgtgtatttatacagttcttaggtgggtgatactatgagaatcgaagtaaccatcgacaagactaaaaaactgccagaaggggccattcccgcccttgaagttgaattgctgcgccgtcttcatcaaaactatgaaggctgcaaactaaatataagacgctcaagcactgatgggctgaccgttctgggcggcgttgatggcgataaaaagcgcatagagcaaatcctgcaggaaacgtgggaaagtgccgatgactggttttattgagctgtaagagagtggcagttatgccgccattgttaactttatacgccatcttagcgcggttattttttagcgtattaactcgttggccgtgttcgttgctggtggagtgtttccaatgaggtatttatggaaataccggatgatttatttccagggtttaaagagcatgccggacctgtccttgtttatgtaaaaaacggcgtggtggaaagaggcttcccgctccgtaaggatgagtttgtcacctcgctcagatcccttgatgaggcccgtaaaaaggctgggcttccccctgtaagtcaggactaaaattagctatattaattacgggtctgaacaacccttcttgccagtcgctgtgccacggagaaaaaccgatggcgcagaagaaccactctcaaaagctgtacctcctgacaccggctatcaaatatgctggtgtttccgtttgtctgtcgcactcaggtggtgcgatatgagagaccctcgtcgcagatgcaaagcacccggctgcggtgcctggtttaaccttacctattcgaatgtttactggtgttgcgaagagcataagagccagtaccttgcgcatcagcgcgagaaacaaaaggttaaggcacaaaacaggttaaaaaataaacccgttcaccatatccgccctgaaccaacgacggctgaaaaacctctcagccactggctggaagttacggagcgcgtggtaaataccctttgccgtgaaactgcccttgctaatggggaggggtgcatttcctgcggaacccaccaggccaaagtatggcatgccggccactacagaaccgttgctaaagcctcccacctgcggtttacccgcatcaatatcaatcttcaatgtgatgactgcaacgtcggcaagtccgggaatatcaaagcttaccgggtcgggctggtggaaaaaatcggtgaagccgcagttcaggggcttgataacgacaaccggattcaccgctggaccatcgaagagctggaagccctccgcctgcaggcttacgccgacttacgcgcactgaaaaaaacgctggaggccgcatgacttaccagcttatctacgtcgatccgccctggcagtatggtaataaaattagcaacggcgctgctgagaaccactatgaaactatgagtcttgtcgagcttaagcgcctccctgtctggaatctggctgctgataatgccgttcttgccatgtggtacaccggcacacataccgaggaagcgatcgagctggcagaagcctggggttttcgaattcgcaccatgaagggttttacatgggtaaagcttaaccagcacgccgaacggcgattcaataaggcgctaactgaaggtgagttggtggatttcaatgatctgctgtcgatgttgaatagcgaaacccgtatgaatggaggcaaccacacgcgggccaatactgaagatctgctaatagccacctgtggcgccgggttggaaagagcgagcgcatctatcaagcaggtggtttattcctgcctgggtgagcacagcgagaaaccctgggaggttcgccgtcggcttgaactgctttacggcgatgtcagtcgggtggagcttttcgcgcgcgaatcatggcctggctgggaccgctggggaaatcagtgcgagagttctgttgaaatgcattcgggaaaatttatcaccagggaggggatatgaatcatctcaccatagagagcatccgctaccgctggatgaagcttcgcctttgccgtcatcgcggcactgtattagttgactaccgcatcctcaaaaactttatacgcacctgtcagatccggggagagacagcatgaaccttgaaaatacagtgaaataccacttcgcaaaatccacgctgattagcgattctccgcgtgctaccgcctctgattcactgaccggcaccgatattatggcggcaatgggtatgacgcaggagcgcgctgcaatggggtacagcgcctttctcggaaagatgggtatcagcaataatgatcgggaaagagcgatcgatctgctggctgaatacgcattaacccggtgcgataaagtagctgcgctgcgcaaactcacaccaaacgtaaaaccccgggttatccggatactcgcagagttcgcctttgaagattactcccgcagcgcttccagtaaaaaaacatgtgactgctgccatggggctggattcatcaatgcagaggtgttcaccaacaaggtaacgtatccggacggcaaaccaccgaagtgggtcaaagttacgaaggggatttatccatcatactgggaggaggcgaagtctgttcgggagcaagttcgggtgctctgccaaaagtgccagggtaaaggaaccatcagtgctgcctgtaacgactgccacggacggggaaaggtagtgaatcaggatgagacggagaaacagggcgtgcctgtcatgggtaactgtaaacgctgtggcgggcgcggttatgagcgaattctctccactgctgtgcacaatgccatttgccagataactgacgccatcaccctggacacctggaagaagtcggttaagccgttcttcgacgtgctgatcactaaattcgatatagaggaggcctgggcagaggcgcagctcaaaaaaataacgcgctgagatatttacttttcccgaattcgtgttaaattgttctaacgatgggctttgtatgttcaccgttaaagaataaatttaagagcctcgcatattgcggggcttttgctttccggcgatacgacaggggtattcgcgagatgcattgcatcagtacccctgtcacatcgccgtatagcgacttaaaccaaccaagaaaggtaggttccatgattgttaatttaaggtaaaaagttaccgtgaagttacccggtcaacctcctgactagggcggaagttgtcagccagagatggagttaaaagtccgcaggccacggtatgacaagccaacggtcttccgaagcaattcggcttcacgaacattcacatttatttgtactaaacatactttcgcctgctcgctgcaggctttttttatggatgacctctttaatcatatggcatgagagtggtatttgactgcaaaacaatttgataataaattgttaatgtggtgaatccccctatgcggaggggcattgccagtctgatatgtttttttgcgcattgcgagtcgtctgtggactggcggcgacttaccgggaggcacccggcaccacacctaataaaaaatgatgatagctgtaaggcccacttcggtgggctttttctttgggcaaaaaaaagcccgcatggtttcatgcaggcaaggcagttacatttagattttgtcccggtatatgtttttttgtccggaagtcgaaagatactgtcttgactactttttgtaaataacggattcaaaccacaaggccatgcatttgcatggcttttttatttgtgccaccagagcatcattcactctgtgctttgtcgttaatccatctggcggccatcctaaaggactatctgctgagttcttttttcagaggttgcattttcttcagtacctcatctgaattagtgactgagaaacccgtcgggaaaaatagcattccatcggatggatgttcatcgtgccagtgcttcgtggcggccatcgtatgagcgtcgagataactggtgtaagcatcaaggagagcgtttttcctgcgcctcggggcgtaaggtagcaactggttgaaatcagcatcgctgataagcctgaatggataagagcctccttcaatagcctcaatttcgcttagcaactttccccgcagtggtgcggaatgcttcctgaactctgccttacgtgacgaatggttactgattagtgacggaataaagagccctagcagtgtcagtatcactccgattactgaaataatttccatgagatttccctatgcctgattttatttattcagtattacccttggtgggattcggtttttcttgttttggtcttggatacatccttggcttcgtacgcggacgagactgaacaagaagaataaatccgtctgagagggtggtgaatcctgatatttttacagtgatttttggtggctgtcacctggcggccatcctattttcccctcgttctgagaggatccacagcaatagagggggctaaatgtccgatcctgtctctggtacttcagttgcggccggcggcctgatgggggctagcatgttcggtctggctaccggaatagattacggcgtggtatttggtgcgttcgccggggcggttttttacgtggccacggcagctaacatatcgcgcggtaagctggtggcatactttatgacgtcattcattgttggtgttctgggcgccggtctggtgggttccaagctttcaagctggactggctacagcgaccgtccgcttgatgcgttgggagccgtattaatatcagcgcttatcatcaaagttctgacgtttctcaacagccaggatctaaatagcttgttcaatatgctgacccggttccggggaggaggttcaagtggtaaatgatccttcagcgctggctaatgcagtcatttgcgccgtcattgtgctggcattgatgttctaccaacgaggtagtgcgagacaccgtccgggcatatccgttctggcttatctcatggtgctggtttatgccagtatccctttccgtttcctgtttggcctgtacgagtcatcccactggctggtggtgctggctaacattcttatctgcggcgcggttctctggttcagggggaatgtggcgcgactggttgatgcactgaggcactgatgaaccaatcacaatttcaaagggcggctggtattagcgccgggttagctgcgcgctggtttccgcacattgatactgcaatgaaagaattcggcattactgctccactcgatcaggcgatgttcattgcccagatgggacacgagtccggaggctttacccgactggtggaaaatctgaactatgcagcagatagccttgtgcctacgttcggtaaacaccgtatcaccgcccagcaggccgctgcactcggcagaacggcaacgcaaccagctaatcagcgagcaatcgcgaatctggtgtatgggggcgagtggggcaaaaagaatctcggtaatcaggttgccggtgatggctggaaatatcgcggtcgcggcctgaaacaagttacgggcttgagcaactatcgcagctgcggacaggcgctgaagcttgaccttgtcacccagcctgagttgctggagcgagatgattacgccgcgcgttcagccgcatggttttatgtttcccacggttgtctgcttcattccggtgatgttgaacgcgtaacgctgcttattaacggaggccgcaacggtctggataaacgccgtgcgctgtttaacttggctaaatcagtactggtgtgaggtcgctatgggcattgaaatgattattggtctggcaactgcgttgctggccgttgtcgctggcgcatttgggttaggccatgcgcgtgggaccaacaaggcagaagccaaagccgatcagcagcgaaccgaagagaacgccgctgctaccgtcgccgcggcagaacgccgggctgatgcaacgaaaggggccagtgatgtacaggaagacgttaagcgtatgggcgatgacgatgttgatcgggagctgcgcgaaaagtttacccgccccggtagtcgttgatacggcctgcaactgggtgagggtcatctacctgaccgaccacgatattgaagttctcgaccgtcagacgaagcgcgacattctggcgcacaacaactccgtgctggctaactgcgagaagaaacccaccaataatcagtaagctaatgcttgcaaattagcagttcgtctgctaacgcttcgtgataagattttcagcggaaattatctattaaaaggaatgcgtaatgtggacgtgctgattgacagcgctttcgagggatatctcttcctcttactggatatgtggacagttttaattgttgctttcgtcgggttggctctgtcattttatggcgtgcaaatgcgtagaactgccgtcaccttctttctgcttgctgcgataatcgggactgctggttcgatctatacttaaatgtaggttgcagagaatatgcagaaagtcaacccgcaatccaacggtggctattactgcggttactcgtgtcatatgccctgacacacataatttgaacccaggtcgccaatggcggccttttttattgccagaagcaggagaagaagcatgtcaacgtttcgtttactgaagcctaagagtgaacttcagcttcagtaaagtattcgatcagttacttaacaggtttactttctgaggggaggaaaatatttccgcagtatgggcagatcaatgttatatcgttttttattctcgacaggctatgtgttgactggcgagagcagtgaggacaggtgctttttacaggtctgagtgtacgtatcttgtctttgagcatagacatggttttatcctcgtgagtgattgctaaccatacaccacaggacagtaaatagctcactttttaacctttatttttttgtgactatttggcttgtacggaagatggcaacgaacgattaaatctaatttcgtcagtgcaaggccattgcacctgttcgaaggcgagtgaaccggctaatgttttattttaaagattttcatcgtgtgagtgtgatgacccctggcaggataatcatccgtctggccagactaattgaatagcagttatcgattaacaagaagaactgccattattgtgtggttgctggtatgaaaaaaaatgaaacacactactctcattgcacctccgtcccaacaccagtctgtcggaggtcagttactcgtttaagtgaggctctcccggatggctcctgagagtttatttaatcgataactgtgcatgacaaaaggccgcatttttttgcggcctttttcttagccatcagaaaggccacctccgggtggcttttttaatggcatcacggagccgctttccgaagtggtttgataaagcctcccacatcgcacagaggtaagacatggcagaaatcaccgacgcccagcagattcgcctgaacctgctttccaccctgaactacgacacagcagcagctaaagtcgctgtagagtttgttcaggatagtccgcttaaatatcagccattcatccagcaatacagccgtgtcacatcagagactgaagtggtggcaaagacgatgaaagcagtgcaggaagcaactgaagcgctgccgctctttgataccgctgctgagcagtccagctaggcattacagcaggcattcactgagtgcctgtgataatgctttttttgggttaagcgcaagggtaatctgaaatctccggcactcatcaggagagtaatatgagttatgaaatgtatgaagtggtcaagcagtatctctttgaagtccatggagtgggacaagtaagggctgagatactaaaaacaattaaacctgaaataaacgctccgtatatgtggcgagcaagccacatatacgatggttatgctcctaatcacgggaactcattagaaacagcaattagtgaattaatttattatattgagcactttgatgctgattcagctgaacctgatccaaactattaatcactattttaaaaatcattaagccgcttgcatctgctagtggctttttatcgtacctcaagtgtatcgttggggcgtattctaaagctctagcgcatgaacagagctgtgcacgataaatccatcataattgtttcttaatgtatttcatccaggttaggattagcctctcaatcaaaaggaaagtgaaaatgaagaagctgattattgcatttggatttgtactattggctggctgcgcaaccgtaggcaaagacttctctgagagcgatgtcgcgtccattcagaagggggtgacaactgagcaaacagtattatcaacctttggaaagcctgccacagtaactgctgactctgaaggcaataagatatatacctggacctatgctcacgcaacggcatttagcgtagggcagggcaaggcgttagtggtgaaaataaacaaagatgggattgttgattcttatgttgttagtaagacgcaaccttaacatcgacactttagcaagagcctcgcttcggcggggttttttattatcagcggcaagtagtttcataaagactataaatgcaaatgataactattatcatttaatgggtcctccccgagggatgggttaccacggggcggcggactcgcggaaaacggctagttttcatttttcatagtcatcatcatcatgtgcacaggttattgattttccagatgtcggattttcaatgatgtcgaatcgtataaaaagtgttcaccatcatggaccaggaaatcgctactttaaaactcaatatcaaccagcttgccgggattactggcgtacaccgccagaccgtcgctaccaggctaaaaaatgtcagtcccgcccagggaagcaacagcaaacttaagttgtatcttgtcaccgatattctgacagaattaatgatcccgacggtttcctcatcgaatcttgaagagatgacaccccctgatcgcctcgctcactggaaagcagaaaacgagcggttgaaatttgaagtagataccaagcaacttatccccgccgaagacgtcgcacgtgaattttcaatgatggcgaaagccgtcgtcatggtacttgaaacacttccggacattcttgagcgcgactgtgcacttacgccggttgcggtatcacgcgtgcaaagcgtgattgatgacctgcgcgatcaggttgcccaaaaagtaatggacgcagaaccagaggaggatgagccagaggaggactgatgacaaaacgggcatctgccaaggggatacgccgcgatgtctccggtattcttcgtgccccacgtcgtatgcaggtggccgatgcggtcagctcatatatgcgtgtgccgatgggggcgggtaactccgtaccatgggaccccaatctggccccttatattattgagccgatgaattgtctggcatcccgtgaatatgatgcggtggtgtttgtcggaccggcccgaaccgggaaaacgattggcctgattgatggctggattgtctacaacatcgtttgtgatcccgctgacatgctggttattcaggtctccgaagagaaagcgcgtgaacattccaagaaacgcctcgatcgcacattccggtgtagtccggaagtaaaatcgcgactcagtccgcgtcgtaacgacaataacgttcacgaccgcaccttccgggccggtaactatctcaaactgggctggccgtcagtcaacattatgtcgtcgtcagactataaaagcgtggcgttgactgactatgaccgctttcctgaagatatcgacggggaaggtgatgcattttccctgggttcgaaacgtaccactacgtttatgtccagcggcatgactctggttgagagttcacctggccgagatattcgtgacacgaaatggcgaccaaacactgcacatgaggcaccgccgactaccggcatattatcgttgtttaatcgtggtgaccgccgccgcctttactggccttgcccgcattgcggagaatattttcagccggaggttgcaaatatgaagggctaccgggattcccttgatcccgttgtggcaagtgagtctgcatatctccagtgcccggcctgcaaaggcaggatcaccgcagatatgaaacgtgaactgaatatccgccatgtctggttacgcgatggagaaaaaatagaccgtgatggcaacagatttggggagccgcggcgatcacgcatcgcttcattctggatggaggggcctgcggctgcatatcagacatggtcgcagatgatatacaaattcctgactgctgagcaggaatatgagtccacccagagtgaagagacgctgaaaacggtagttaataccgactttggtcggccttatctaccccgagccagtctcgaacaacgtaagagtgagctgctcgaacgacgcgctgaagacgtgccgaagcgatctgtaccagatggtgtgctctttatgactgcaaccgttgatgtgcagggcggtaaatcccgtcgtttcgtggttcaggtgactggctacggtgagcagggtgagagatggctggtcgatcgctacaacatccgccagtctctgcgggcaaacgagcacggtgaatgttactccatcgatccggcaagttacccggaagactgggatttacttttgtctgacgtgttcgaaaagtcatggcccttagcgagtaacccttcaaaacgcatgcggctcatggcgatggctgtcgattccggcggtgaggatggtgtcaccgataacgcatataagttctggcgtaagtgccgccgggatgggcttggtaaaaagattttcctcttcaagggcgacagtgtccgacgctcaaaactaattacccgaacatttcctgataacactgacagatcaactcgccgggcaaaagccgctggcgatgtgccgctttaccttcttcagactgatgcgctgaaagatcaggtgaataacgccctgtggcgagaatcacccggcccgaactatgtgcatttccctaaatggctcggcagttggttttacgatgagctgacctatgaggaacgttcacccgatggaaaatggagcaaaccgggccgaggtccgaatgaagctttcgatctactcgtttatgccgatgcgctggccatattgcacggatacgaaaagatcaaatggccggatgcgcctgaatgggcgaggcggacaacgtggatcgaagaaagcacgccgaaaactggcgaagcgtcccccacgttatcagcaaaaacgacccatagcagaaaaaaacggaaggcaaataagccggatgttgaaaacaatccgtggactacatcatcaggaggctgggtgtgaaacaaactgatattgaatccattatccagcgttataccgatgcggaaatagctgtgctggatggaaagtctattacattcaacggacagcagatgacgctggagaacctgtccgaaatccgcaaggggcgtcaggaatgggagcgccgtcttgcatccctgttggctcaacgtcacgggcgacctggttataaactcgcgaggtttccatgagcctgttagatgatgcgattggcgtcttttcccctggatggaaagcggcgcggttacgttctagagcaatgatccaggcatatgaagctgttaagcccacccgaacacacaaggcgcgcagggaaaaccgttccgctaaccagctaagccagatgggtgctgtatccctccgtgagcaagcgcgctggctggatagtaatcacgatctcgttatcggcgtgttcgataagcttgaggaacgggtggtaggtgcaaaaggaattattgttgagccccacccggtactgaataacggaaatatagcgaagaaacttgctgaacaaatcagagcgaagtgggcagaatggtcggtcagccctgaggtcacggggcagtttacccgcccgatgcttgagcggttgatgctcaggagctggctcagagacggagaaattttcgctcagatggtgaatggctcagcgcagggacttgagccggtagctggagtaccattctggcttgaagcgcttgaggccgattttgtgccgatgaccaatgatgagtccctgcaactttgtcagggggtatatgtagataactgggggcgcccgaaaaagtacctagtctataaaagtctacctgttaccggccgtcaattggatacgaaagatgtcgatgccgggaatatgcttcatctcaaatttacccgccgtcttcatcagacccgagggacctctctcctttctggtgtgctcatgcgcctcagtgcgctgaaagaatacgaggatgcggagttaacggcagcacgtattgcagctgcgctggggatgtacataaaaaaaggagacgggcaaagttttacggatgagaccaccaaagacaatcgtgacgtaatgattgagccaggcattatttatgatgatctgctgcccggtgaagacatcgggatgatcaagtccgacagaccaaaccctaaccttgaaacattccgaaatggacaattgcgcgctgtcgctgccggtgctcgtctcagcttctccagtacagccagaaactacgatggaacatacagtgcccagcgccaggagttggttgaatcaacagatggttatctgatccttcaggactggttcatcggcgcaatcacccggccaatgtaccgaaactggttaaaaatggcggtagcttctggcgaaattcagctaccacgtgggctggatatggcgtcgctttacaccgcagtttattccggaccggtcatgccgtggatcgacccagttaaagaggctaatgcctggaaagcgcaaatccgaggtggtgctgcgacagaatctgactgggtgcgagctagcggacgcaatccggatgatgtgaaacgtcgtcgcaaggctgaagttgatgataaccgcgaactgggactggtgtatgacaccgatcctgcaaacgataaaggaggcaccagtgccgaagtcaaagaaccggacgccccgtcgtccgaaagccagcgcaagaagtaattcgtggtttcgtatgcaggccagcgccgacaatcaggtagaaatctatatctacgacgagatcggctactggggcgtgaccgcccggcagtttgttaacgaccttaaagcgcttggtgatgtgacccatattaatcttcatatcaattcgcctggtggcgatgtctttgacggcatcgccatttttaatgctcttaaacatcatggtgcgtcaattaccgttcatatcgacggtctggccgcgtctatggcctcggtcattgctatggtgggtaatccggtcatcatgcctgaaaacaccatgatgatgatccataagccctggggctttgctggtggtgatgccaacgatatgcgtgactacgcagagcttctggacaaggttgagtctgttctgatccctgcttatgcagagaaaacgggtaagagctccgatgaaatagcggcgatgctggaagatgaaacctggatggacggcaaagaatgcgtcgctatgggttttgccgaccaggtcaccccctctcttcaggctatggcctgtatccagtctaaacgtattgaggacttcgaaaagatgccaaaaaatattcgcaacatgttaacgccgccgcgagctaccacgcaacgcgatccccagcaaccacaagtgcagcagcctgtggtgagccaaccttccgtaattgacgaaaacaccattcgtgctcaggtaatcgctgagcaaaaggatcgcgttaatggtattaacaacctctttgcgatgtttggtggtaaacacgccgaactgcaggcgcagtgtgtagcagatatggattgttctgtcgatcaggctaaagacaaactgctggtgctgctgggtaaagatgcttcaccatcggcgaaaaccatgccagcgcatattcatgcaggtaacggtaattttgtcgccgatggtattcgccaggcattgatggcgcgtgccggatttgaagatcaggaacgtgacaatgtctacaacggcatgaccctgcgtgaatatgcccgcatggccctgactgagcggggaattggcgtatccagctataacccgatgcagatggtagggctggcgctgacgcacagcacctctgattttggcaacatccttcttgatgtcgccaacaaatcgattttgcagggctgggacgaagctgcagaaacctttgagcagtggacaaagaaaggccagttgtcggactttaagacagcgcatcgtgtggggatgggcggattcccgtctctgcggcaggttcgcgaaggcgctgaatataagtatgtgactaccggcgataaaggtgaaaccattgctcttgccacctacggggaaattttctccatcactcgccaggcaatcatcaacgatgatctgaatcagatcaccgatgttccgatgaaaatgggccgtgctgctaaggcgactataggtgacctggtttacgccatcctgaccaaaaacccaaaactctctgatggtaaggcgttattccacgcagaccacaagaacctgtccaccggtgctatttccgttagcagcctggacgatgcccgtaaactgatgcgcctgcagaaagagggagaacgatctctgaacatccgcccggcatttatgctggtgccggtcgtgctggagacactggctaaccagacgattaaatcagcgagcgtaaaaggggcggatatcaacgccgggattattaacccgatccagaattttgcagatgtgattgcagaggcccgccttgacgaagctgacgcaaaagcctggtatctgatggcggcaaaagggacggacaccatcgaagttgcgtatctgaatggtgttgatactccttacatagatcagcaggaagggtttaccactgacggtatcgctacaaaagttcgtatcgatgctggtgtggcgccgcttgattaccgcggcctggtgaaatccagcggccagtaatcattacagttctgaaaacgacgcccggaagggctttttttatacctgaaatcagccctgtggggctgacaggagacgttatggctaaaaattatgtgcaagacggcaaaaccatccccgtgaaaaattctggtaccgaggaaattctcagcggtacacccgtttctttaggcgggatgattgcggttgcaattaccgatattcagccgggtgatgtaggcgacggattcgctgaaggtgtctttcttttacctaagttgccagctgatgccgtgaccgccggggaaaaggtatatctcaaagctggaaatgttcagctggatgacaccgatgcggtgttagccgggactgcctgggaggatgctgcggcaggcgttaccgtcctggaagtcaaaatcaatggctaatgtctttgacaatatggctggcaggatggatgaactgacggcgaaaaggctgggcagaacggtgactattaatggcgatgagcatattgctgttgaaagtcacctgctgcctgagctggggccggtcgcgggggatgggattaacctggttatcttcagcgctggctatcagtcggcgcggggagatgaggttatttataaaagtcaggtttacaccgttacccgatggctcctctttaatggtaagccgcaaatctggattgaggaggtcacaggtgacgattaaagggctggaagagctcaggcagaacctgagcaatatcagtaaaaatgccattcctcgggcgacatcccagtccattaaccgggtggctggaagggcaatcagccgcagctctacgcgagtggcgaaagagactaaggttaagcgcaaactggtcatgcagcgcgccaaacttaaacgggcaagccctaaaaaaccaatggctaccatcagagtaaatcgtgggaatctcccggcaataaagctggggcatgtccgtgttcagctttcgcggcgtaagcgtgatagcggcaactctggaagcgttctgaagattgggaatttcagcttccctggcgcttttgtgcaacagcttaataatggtcgctggcatgttcttcgacgaaccagtaaatctcgttacccggtagaagtggtgaaagtacctctggccacccccctgactgctgcattcaaagaagaacttcccaaactgatggcatctgatatgccaaaagagattatggcggcccttaaaaatcagataaggctggtgacaaaatgatccacccgcaaatacgaaaagctgttctggacaaactgaagtcaattaactccggaaaaatattctggtatgacggtcggccagctttcctggctccagaggagttgccagcggtcgcagtatatcttaccgatgcgaaggctacgaggggcattattgacgaggaggagtgggaggctgtccttcacattgaggtatttcttaaagccactgccaccgacagcgagctggataaatggatggaaaaccgcatatatccggcgatggtagatgttcctgaactaaccagtcttgtagaaactatcagcgttgtcgggtacgactatcaacgagacgatgaagccacaacatggggctccgccgatctccaatattccataacttatattatgtgaggagcttatgccaatcccaacacctaccacaccgaccaaaggtgccggaacaaccttctggatttacactggaacaggtgacccattcgatgatcccctaagcgatgtcggctggacccgtacagcacaaattaaggagattacgcctggggagctgactgctgaatcatacgatgattcttatattgatgatgaggcacctgaatgggattccactgctcagggggttaaatcagccgggcaaaccagcgttacactcgcatggaaaccgggtgagtctggtcagcaggatcttgttgactggtttatgagtggcgatgagaaatcctacaaaattaaatatccaaatggcgctgttgatctttttaccggttgggtaaatagtctgggtaaaaccattgcgcggaacgaagttattacccgcagtgcacaaattaccaataaaggtaaaccttctctggctgaagataactcttcaattaacccttaatatattcgacagcggtgcccggcaccgcgtagggtaatataatgacttatcttaaaaaagacacattaaatcccagtggtgagaacattttgctgtttgaattatctgcttacagtcgaatgcaatatattgaatttatggttgaagaacggaaagctttaccacctgagggaagcactcctgaagaaaattttaaattggccaccttgttgactatgcgtgatcaggccatgcttgtcgctttatccttgagcgaggcagacgatgagaaccgtgagggaaaagatattttccatgaaatcatgcgcaaatatccaccgggattactgggtagtgcagccataatggtccggatgctttcggggatggttcctcccgctattgatgaaactgaagaaactattaaagaagaggaagaaccggatctggaaaagtcctgacccgctcacgtcgctttgctatgcgcttagccaaagaatttggtcgaccagactggcgcgctatgctttccgaaatgtcttcctcggaatggttcgaatggattgaatattaccaggaacgttgctttagcgacgatcttcttgattcccatttcgctaatttaagctacctcgcaatcagtcttttcaccgatccagacaaacacggtatttccgccctcgattttagtttacttacaacaggtagggaagaaaacgaggacatttctgacgagcagcttatgtcaatagccgagagcattcccggaggagttcgctatgtcccagccagtgggtgatctggtcgttaaaattgatggtgatagcgcaaagtttgatgaggaagttgctcatcttaataagcaactgagtgggttaggaagggcagcaaacgacagctcagcccaggttactgcggcattttcacgtcaggagcgtgccgctaaacgcgcgggtatatcaatcgggcaatataaaaatgcgatgcgtatgttgcctgcgcagttcacagatgttgccactcagttagctggtggtcagagtccttggctaatcatgcttcagcaaggtggtcaggtaaaagactcatttggtgggctggttcctacctttcgtgccttacttggctcagtaacccctctggcgcttggtatcactgcattgaccgccgctggtgcgggaatggggtacatttattataaaggatcgtcgacactttctgatttcaataaaacgctgacgttatctggcaattctgcaggtctgactaccgacagaatgctggtactggcaaaatcgggccagcaggccggacttacctttgatcaaaccagtgactcactgaaggcattaattaatgcgggcgttggtgccggagcccgttttgatgaattaagccaggcggttgcaaaattttctacggcttctggtgtccctgttgaaaaagttgcggaggccttcggaaaactgactaatgatccgacgtctggactgattgcgatggcacaacagttccacaacgtgacatcggagcagatcgcttatgttgctcagctacaacgttctggggacgaggctgcagcattgcaggcggctaacgacgctgcaacgaagggttttaatacacagacccagaccctcatcgataatatgggggcgattgagcgctcagccgactcattaaaacgtgcatttaaatccatgtgggatgctgcacttgatctggggcgtcctgataccgcagatgagatggccagcaaggcagaggctgcttttaaacgggctgatgaaatatggaatctaaggaaaaatgaccgttatgtaaacgatgaggccagagctcgattttggaatgatcgtgagtcagcccgtctggcactggatatggcgcagcaacaggcaggaattgccaaagccagtgtagcggcagcagaaagggaagcggaggccgaatctgataagcagaaatacgcggcccaggcacaggccaattatgctaaatcgcagacggcccttgaaaaatacaccgcacggcagaatgaattaaataaggcactgaaagaaggacatattctccaggctgattacgccataaacatggctgcagctaaaaaggaatatgaggcatcagtaaaaaaaacgccaaaacccaaaggcgtgaaagtttctgctggtgaccgttcgtctgatcaaacgaatactgaaacacttcagttaatgacccagctgaaattgctgcaacagcataccgggcttaacgacactatcagtcagcagcgtaaaaatttatggtccctgcaatcaaaattcacggttatcgaagaagcatcgaaaacccgtgcgctgagtaaagatgaacaatcgttactcaccaacaaagataaagttctggctcaggcagaggtcaatgcaaaattaggcgatcagatcgtcgctcaggaacggctgaataagcttcaggataactcgttaaaatatgttactcagatgcaggaaaagacggctgcattggtagatagtgctggattaggtgacagggacgcacaacgtaataacgagagggcgcaattaaggcaaggttggaaaaatcagggtggaagcctggatgatgaagggtatcagaaagagctttccgcccttgagggctattacgctgcgcaggatgaaatgcgtaataattggttggctggcgttcagtcgtcatgggaaaactatgctgacatggccaccaattacaatcagatcgccgcggatacaaccaatactgcgcttagtggagtaacaagtaatcttcagcagggattgtatgaccttgccactcagtctgaagatgctggcgatgctctgagcaatatggtggaaggatttggcaaaacagttattcagacattgacccaactggccgcacagtggctggtatatgagggcgttcacctcctggtaagtaagaccactcaggcaaccgcgacagctccgatgatcgctaatgcgcaggctacagctcttcaggcccaacttgcagcatatgcatctaccgtcgctatcccaatagtggggccagctctggcacccgcagcactggcagcggctgctggtgtcaccgccccccttgttgctgctatctcagcatcggctttagctggtatggctcacgatggtatcgacaaaatccctgaaacgggaacctggttattgaaaaagggtgaacgcgtaaccacagcgggtacatctgcaaaactggatgccacgttagaccaggttcgccagcaaagaatagcaagcagcgggtcggttgttgctgaattccataataccttcacaggtaaacctgacgataccaccatgcagatggttaaccagcaaatgcgggcgtctgaaaaaaggcttaagcagtactttacttctcaggtacagaatccaagtgaaaattacggtcgtgcacttaaagccgtctatccggggaggcgtatgaaataatgtcagatatttattatccacatgattatatacccggcccgacatacgataattatggatttgaatcgactgatcctatggttcgtaccgacagagtgggggggcttgccaggcagcgtagaagatatacatcagtaccaactaataatactgttgtatggcaatttaaaagtgatgcgcatgcacaagtatttgaagcgtggtatagagacgttttaactgatggtgcggcatggttttacatgaaatgtaaaactccagttggactgaagttttttaaatgtcgatttaatggggtgtataaaggaccatcttatattaaaccaggtctgtggcgttattctgcaacccttgaattaagggagcgaccacttgcccctgtcggttggggatattatccagaatggctggccgggcaatctctccttgatattgcactgaataaggagtggcctaaacatgacggtaattaaccggctgtatgcgtcatccggtcctgaagtcattattggcacacttcagattaatgtgggtgagcagtcgtattatttgtgtgaaggttatgaggacataaccgctatgaccgaggatggggcggaggtgaagttttttgcctgcgcaatatcattctctcttccggcaaggaacgatgatggtacacaggatctgaagttttctttgtgcaatatcgatggtgttgtttctaccgctatacgtgaggccgccgataccttaaaggaaggtaccataatttttcggaagtatatttccactgatctttcgtcacccgctgaaccgccatctgtgatgccgattaagggcggttcctggaaaccggtagtcgttaacattacagccggctttaaaaacgtccttgattatgcctggcctcgcaaccgcttcactttgccttatttccctggtctccgttacacccgataggtatcccatgctgaatattgataaatatctggctgtccgctggcagatgggcggacgggtttttcctgtgcttgattgctacggggttgttcatgaagtgcgccgcgatctcggactcactgactggcccgcttttgaaggcgtggtaaaagagggcgatgaaatgcacaccgcttgcaataacttccgtcaaaacgttgttcgatgtgctccctgccctggtgcggtggccgcctgctatacgggaggagtaatcggtcatctcggtgtcgtggtggagctgggcggcctgctgtatgtgatggagtgcaatccccaccgtaacgtgacgatcctgccgttgacgcgctttgagaagcagtatctgaaagtggagtattaccagtgactattcgtgtatacccatcccgtttaccgggcgaaccgctggaaacgcatcagcatcgggtcatgacagttcacgactggatgtctgaaaatgtagaaaattatcgtccagatatgtggcaaagggttgcctttgaggtcaacaacgtctccatacctccgcaggaatggccgttctgtgtaattaatcctgatagtgatgtaagggtttatccgatacctggtgaagccgtgtcgggttcggttatcgccgcctgggtcgctgcggccgttgctgctgcatcagctatttacgccatcgttatgatgtctcaaatggacaaaggggggtattcctccagtaatggtacgtcccttgatctcaatccggcaaaggccaatcaagcaaaattaggtgatcctattcgtgaggtgcttggtcgctcacggatatatcccgattatgtcgtgcagccggtaacccggtttcaccctgacgatccaacccgcatgaccgtagagatgatgttatgcctgggcttggggaatttcgcttttacaaatggcgatattcgcgtaggcgccacgccagtcacagccctcggcgattcattctcttataacgtttattctcccggtgcggatgtctcaggcgatcgccgtagtgaaaactggttcaacagcacagaggttggcgggacatcaagcggttcaggtctggatatggcccagacatcacccgattctgttgatattaatgccgacagtatggcagtttctggcgccacggtgaccttcaacggacttgatgatgataatgacgacgacgatgatggtaatgccttgccggaatcgtgggtgaccggagccattgtaactatcattgccccggcaaattatcttgtttcaacatcatcaggttatagcgttctgaccggtaatagtctggcggaaatcaatccagtttctggcatggccgttacgctggcgattggtggttcagagtatgatctggtgatcgcttcttatacaccgaaacaggatgcggttcctggaaccggcggtatagcggccagtttacgtgccagtgctgcaccgacaacatatgatttttccgttatggggcagacatttgatatcacctggcacgctacagcgttcaccatctcccttgtagccgattatctgaatatgtcagggcttcttgctgctataaacgaagggcttactggctctggactcatggcgcaggatgatggcggggtcgtgcggatagctgaaatatccagcccctggctgggtggttccatcacctcttcttctcttcccgtatctattttcggcgacagcccggagtttacttccggaactgcatccagcggcgggagtccggcgattactgctaatgtcacgctggcctatggtagcgcaacgggggctgctttctccggcatcccggagggtactcagcgattgtcgctggcgcaccgtgataacgaataccgtattgctgatgcagacggcacgaccgcaacggttcagcggctggtggacggcgttatcgatcctacctggccgggtttttcaccgcgcacgatgatcgactaccaggctaccggtataaacgacaacgatacttggctgggaccttttcttgtgtgcccggaaaatgaagtggttgacgccttcgaggtaaatttctcgtttccgtcgggtatctgtgggtttgacagcaaaggcaaaaagcggatcaggcattgcgagtgggaaatacagtaccgcgtgtatggtgctggtgccggatggacgagtaaacaaggcgtctatgctctgcaaaacgttaatggactcggttttactgagcggtttgagctgtcggtaccgggccttgttgaagtgagatgcagacggcgtaatgagcagggtagtaataatgcacgcgattcaatgtactggcaggccctgcgtgggaggctactggcgcgaccttcttcttatgccggtgtcaccctcatgggggcaacggtcgagacaggcggaaaacttgcggcgcagtcagatcgacgtgtaaacgttgtagccacccggatttatgattccggcacatcccgcagcatttcaggcgcgctttatcatgttgggcgatcgctgggtcttgaaatggactcggcggcaatagacgcgctcgaaagcgcctggtggacgcccgacggtgaaacgtttgattttgcgacaggcgacagtatatcagcgctggaaatgttgcagaaaattgcgaatgccggaaaggggtatttcctgctgaatactcaaggtttagcgtccgtcgggagggaaggaattaagccatggaccggggctattaccccccatgaaatggtagaagaactccagacagatttcagtgcccctaacgacgatgattatgacggcgttgacgtgacctacatcaatggcgcgacatgggcagaggaaactgtacagtgccggacgccggataatccgacccctgtaaaaactgaggcgtttaccctcgatggcgtccttgatcagaatcgcgcttatcagattggcatgcggcggctgatgaaataccgcctgcagagactggttcacaagaccactacggaaatggacgcgctttgctataacgttggcgatcgcattgtactgactgatgatattcctggtagtaacaccatctcgtgtctcatcgacgcgatgacaacagttgatgggatgacaacgtttagtgtttctgagcctttagactggtcattcgcaaatccacgggtatacatcaggtaccaggacgggactgcttctggactgctggaagcctctccggggggtgactatcaagtcttagtgccgtatcagcttgagttcgaaggaattcagattgatgatcctatcatcgaaccgccgcggctgatcttctgcagttcagagaaggatgtgtatcacgccattgtggcggaagttgccccgcaggatgacggcacatgcgaggtaactgcccggcaatatcgtgacgaattctacgcatacgacgatgctacatatcccggcgacgtctcgtaataccccataaaaaccccttattaactcttttcgctcaaaccctcgtttgcgcgaacgccttttttggagcaaaaacatggctgcagatgaactgaatccgccgctgggtacgacgacacctgaaatattcatggataacgtcaagcgcgctgacgaactggtgaacggtccggccggaacggttgacgaccgcggcggggaaccactcgatacctggcgccagatgatggcaaagaatgatgaggtccggcagaacatcattccgctcggcaagcaatacgttgatttgcctacagcgcaggcggatatcgcgaacatacctacaggcagcttcgtgtttgtgagaagcgcggaagactcacgaatagccaacgagtaccagaatgtggcgggtacgctgacggccaccggtaagtttttcatgtcgggggaaggagtattacaagcgatgtcccccgctgtgaaatcagccggttatgcggcattgagggcaaacgccgctgcgctgaaaaccacagcaccagaaatgcagactcgccttcgtgtttccagcgacttcactcaaatcctcgccacgaagaactttgacgggactgtagatgttgctttttctgctgactatgcggacccggtgatgctgaagctgggccatgctgcatggtcgagcacgttctccaactgcacaataacggtgactggtaacgggcgaaaactgtttgagcgcgtgttttttggtggtgaatcgctggaaaatggtgtactgaccacgccgtaccaggagtttgcgctctctgcgttcaccgtgtcctcctctgcgaaacagccgaacggctggacgctgtacatgacgggaactcttccgggtccgctgccttctgacacgtcccgcatgattcgtgaccgctcactgagtgtggcatcactactgccgggcgggggaggcaccgctacgactgacggtgtgagttataacgccacaacctcacgtctggagttcactgtcatgtcagcaggcattaccgctgccggatttgaggataccgccgctggcgctgagtcgtacatgtggtcgctgtatgccgggatgctcctaagccagcaaacgtccgccacgcaggaccgcccggagtattttgttttcttttccgacgccggagctgtaaccgtgacggcaaccgacaaaatcagcacgtcattcaccgtgtggaaaaagcctgttactgcgccgtctgaatcccgttcagtgaaaaacgccgcagacatcagcgcaacccgtgatgacctgattaaaaccctcatccgtgagaacaacgaaaaaatgaataccttcagcgctcaccagggcgcttaccgcatcaccggagctgtcgcggcatactcggcatcgattccatttaacagcgtacttaatctgtccggattatttctcgccactaacttttatcgcagcgtaatcagtatttcagacagcaccgggacggtgaaagaaatcactattctggatggagaggaaattactgcaggggcaatctctacgccgtatcaggatttcaccatcgacccaacggtagcctcatcgctcaccactatcggtaacggcgtggcagtgggttttaaggtttcgctcccgggcgccctgccaactgacacgacccgcattatccgtacccgcgatgggtcactgagcggggcgcatattgatctgattaacagcgccactacagacagcgtgacgtacaaagcgtcaacgggtgaactgctgattctggcgatgagcacgaacatcactgctgctggcatgacggtaacgctggaaaacgcgctggcttacgtgcttgataaataccgcaacacggtattcagccagaaaacggccactgctgtcagcaagccgatggtcacgcagttcgccgtcaatccaggaacactgactgtcacatccaccgacagcgtgaatatttacctttcattcgacctgtttgcacggccgggagagtctgccgcgtcgtctgcctacaaacgtttttccacggtggtaaaaaataacctcccggtagccctgacgaatgtcccgattgaactgaaatgtagctttgcgcctggtgaggctgtctcagaccagtacattgtggttgaagatgaaaacggcaatgcgttcctgccgcagtggtctgatgcgccggatttcaaccgccgccgcaatggctccctgggttactggggcgatggctccctgcgggctggttcgctcgttattatggactcactggcggcaggggtctctaaaaaatacaacatccgggtttacacggtgcgccagcgatacagcatctattcccgcgcagtacgggagtcctctacctccctgcgtgtcagtgcagatgatggcaccacactgacattcgacagctatcgcaactggctaccgtacaagctggggtcaggaggaaaagactacacctcgatcgcggaatttgttctgacgcgacgcgcgggggctggcggggctgcgaccgatttctcggcgatggccactaacgacccgaccgcatcctatcgcatcgtttctgatggcccggtgtttaccgaggttgaaactatcagctacagccagatttcagcaacgtacccggagttttccagccagtttctcaaattcacgacgaggacaaaggttttccagaacggcatgattaaaactgaaaacgttatggcggtggataaagcgatcccggcagatgtgcttttcggtgttcgtatgcgtatgaacctgatttccaccgcagccaaaacgacaaaagcgaaccacaatgttttgtggtccgacaactcagcaaaacagagcctgtcgctgatttacgctaacggtaacgcccgtcgcgatacgacagaaaccatgcctgtttacaacgttgcgtccgccactaccggtaacacctcctatgcaaggcaggatggcggagcggtatcgcctttcaccacgaccggggcagtcccgcagggctgggcgtggagtaacggcttcctgattaacgtcaaagagcaggcagctaataacgacgaccttgctaatcgcgttcagaatccgccggtgggatttgtggctcgtaacacaaccacgcagtacgcccgcacccgtgcactgatgaaccacatcggggatatcgtcgagggatacaccgactggtgggataatgaggccaccgccacggatacgggcaacggcgtcatcaacaccctgggcggtaaaattgtcgccatggtgagaagcggcaagggggattttaactccgtatacgctctctttgaggcgcacgctgatgcgcattacggtggcgtgacgaatatcaacatcggggaagcggttgacctgaaagggctacagtttatttcccgcactatcacgccggtggtgtggtggctgtataaactggcggtgaaaaacggcgatacggcaaaacaggcagcgctgaaaacggcaatcggcaatctggcgaatacggcaaaaatccagtacggcggcacacagaacggcaacagcaacttttatgcggctgctttccgtttgtgggcgatggccttcgcggttggtctggatacagacggcagctacaagaccaacatggaccgtatcgacacgctgtacaccgatgctaccgcgaccggatttgccaacgtgaaaaacatcatcacggacaacaaaaacgagtcggtatcggctgcgcggtatctggcctaccagtcctacgcgatgaacaactatgtgctgggttgccgggcggccgggcgcacaccagtagtcgatatgacaacgacctggctgaacgcgatttcagccgccggcggtctgtcagagtttgactattgcatcgcagagtcaagacgcgggacgcctaccacagtggcgtttttcccgtctctgctggcgttcaacggtgacctttctacagttgaggcatgccatcgactgctggacgggttcgatgaatacgccagcggatggaacgggattgagtacaggctgtgggatctggaataccaggtggttcgtcagacctctttttcagagttcggattcatggtgaacgttttcactgatgcgtacatggaatggtggtttctgaataactgataatcaaactggcggctgtcatggaaattgatagccctaacctgtcttgatcttcccacccattaaaactactgtatgcataaacagtatctatgggaggggagatcatgcttcgacaatcagacatcaaccaggcatttcgggaggcaattcttcgtaactcgaaaggctatcagtatctacacacacgagacttcatctcttgtttgatgctgcggggcattcatttctcagagtcagaagccaatcgctggattgagcgttatcagagctgcttcgctgacaaaacgccggaccataccgagaatagattatggattctgcggaatatggggagggtgatgtaatgactgccagctattttccttctcctgctgctgattacatagagcagaggctgaccgtcacggccgcatgtgatatcagcgctaactcgcaggttatccagactgaccgcggctatgttgttttggacttgtcgttaaaagtgacgcagggaagcgtcgttcttatccgcctggatggcgaactgcagtttgcaaaattgatgggtagctcttttatcacagccgaaggcgagagcatcgaaggtgaggcgctggaagacgttgaagtactcggagtcgcaacccatgcgattaacgacttgagacaggatacaagtcctgtttgataaaaaaaatccccggagcaggcacactcaggggaaaaaacttcataacatcattgctgtgtgcgtctttgcgcggagtatatcttctgagaaaactcctggtatttccagatatttttgatctgaacagttaagttaaagttccggttgcatgggtatgtttttacttaagggggcctggagatgttgaagtgctcggagttgctatgcacacgatcaacagcttgaggctggatactacccctgtttgaaggggagtgtgattaaccgcacgttaactactgtttcctgaaattaacatctgagataataacctcacgaataatagagcaaagcgcgtttaaatgtgagcagtaagaaaacgttaacgttcatgcaatttttgataataaatagtcaactcgccggcatctcagatacttgggctgatttgtgggtattgattttccatacgagccttagtgcgggtaggctgttggcgcttcggtacgatgacatagataatgattcaatactgatacgagagcgtgggagactgaaagcgctgcgcgttgaaattccacctagggcgatggcgatgataactcggcgacgggaaaggtatccagaggatgtttttgtgtttcagagtcattcgaaccgggtaaagtatgaatgtcggccagtcactttaattgctttcaacactgccttaggccgggctgcaaaatccttaccgggagtcaccgtgagcagtagtagcgcaagaaacgtatctcattaatcgcccataagcacctgctggcaaagtagtcaacttgcaaccccttagtgggttatttgtaagctatgagaatggttattgcctcagacccttagggggtaaaattggggcaaattttggggcagaataacgtttggggcacgatttgggacaatcaaatgtccgcatttgtccacatttgaccagaagtcaataaagttaagttgttgaaaaaattgcagaacgttgaatttgctaaactatttttttgcatgccataataaagttaatatttaggcaaccgcgatcaaaaaaattgcgctgtttgcagcaccggacgaggttattgcgtaaactttaaaaactttaccaactcgctgtttctttaaggtcatttgtacgctttactcaccggctgctgcggcgcggaacgagtgtggcggcatatttttgtttggaaaggatacttgggtggctcttatgacgcatgatgctttttcccttcgcggcctcgcggcaggctgcgcgcttttacttctcgttgcgcctgcggtgcaggctgcggaacaactccccgatgcgccatccattgacgcgcgagcctggatcctgatggactatgccagcggcaaagtgctcagcgaaggcaatgccgacgaaaaactcgacccggcgagcctgaccaaaatcatgaccagctacgttgtcggccaggcgttaaaggcgggtaagattaagtctacagatatggtgaccatcggacgcgatgcgtgggccaccggtaacccggcgctgcgcggctcttcggttatgttcctcaagccggggatgcaggtgtcggtagaagatcttaacaagggcgtcatcattcagtccggcaacgacgccagcatcgcgatagccgactacgtggcgggcagccaggacgcgtttgtcagcctgatgaacggctatgcgcagaaaatgggcctgaccaataccacctttatgaccgtgcacggtctggacgcgccgggccagttcagtaccgcccgcgatatggcgctgctcaccaaagcgatgatccatgacgtgccggaagagtatgcgatccataaagaaaaagagttcaccttcaacaaaatccgccagccgaaccgcaaccgcctgctgtggagcacgaacctcaacgctgacggggtgaaaaccgggaccaccgccggggcgggctacaatctggtttcttccgcgacgcaaaacgatatgcgcctgattgccgtcgtgctcggcaccaaaactgaccgtatccgttttaacgaatcagaaaaactgctgacctggggattccgcttctatgaaaccgtgactccgattaaacccgatgccaccttcattacccagcgcgtctggtttggcgatagcagtgaagcgaagctgggggcgggcgaggcgggttccatcacgctgccgaaaggccagctgaaaaacctcaaggccagctacaccctgaatgatgcacagctgaccgcgccgctgaccaaagggcaggttgtcggcaccatcgactttaaactgaatgataaaaccattgagcagcggcagctgattgtaatggaagcggtaaacgaaggcggtttctttagccggatgatcgatttcgtgctgatgaaactgcacggctggttcggcggttggttctcttaaaatgcaggccgcgccctgcggggcgcggttagtaaagcagtgaaatttgtttttccttcgccagcgcgagcagatcgtcatccggacacacgtcgctggctattacgtcaaactgcgataaatcccccatccgcgccggccggactttgccgaatttactgtgatcgacaaccagcacgtggtagcgagcgcttttcatcgcccagtgtttgaccggcagctcttccaggttaaaacaggtcgcgccctgctcgcaatcgacgcccgcggcggaataaaacgcgatgtccgggcacagatggctcagcgtatcctgcaggcttagcggtttaaaaatggcgttgctggcgtggaactcgccgccgcacaaaattgcgcggcactggggcttttcctgtaaggaaagaaaggtattgagcgaatagcagacgccggtaaagggcagggcgctatcgatggcgtcgatgatccacggcgtggtggtcccgcagtcaaaaaaggccatctggtggggctcaagcagctttgccgcatggcgggcggcgcggcgtttttcatccacaaggcgcgttttctgatcgctcagcagatagtgcgttgcgctgcgcggctccagaacgatatagccgcccagcaacacgaccggaccgctgtggccgttgaggtcgcgacgaatggtcatctctgacacgccaagcagggtggccgcttcttttagatggagtttatcactgcgcttgagtgcctgaataagctggctgatgcgttcgtcacgacgagtttccatattccctctaagctgaaagcgccctgcattgacagggcgtcagcggcgattttacctgccggaagaggcttagtcacgcgcaggaatcgggcgctgccgcaactttaccggctggtcaggaacgtctattcgcgcacccagcctttgcgaatcggcagcgaaaagaacaggcggtacagccgctgcagatgctgatagagggtttttccgccgctttgccacagcagttgggcgctaaggcaggcgatcatcgcggtgagcagcccgcccagcatgtccatcggccagtgaacgccgagatagacccgggaccaggcaatcgcgcaggcaacggcgataagcagcgcgcccgaccacaggcggtgccagaacataaaggccagcgcaaaggtaaagcaaatagtaccgtgattgcttgggaaggagttattgggtgaatgatgcaggaagttatagcccacaccggcggcaaacggacgttcatgcggaaaaaacacgccgaatatccatgaaagcgtgaggctaatcgcgagcgccatcatcaccttaaatactagctgacgctggtttggcccccaaagccataaggcgaacaccaataatggcacaataataatcaggtctttggcgataaacgtcgcgatttcaattgcccaccacggcgacgcgggggtggcattgaggaatgcaaacagcgagtagttaatattttccagcatacatccaggctcttgggtccgttagcaacaagccgcccaccttaaaaaacggtggcgataaggtaaagcagtattgtcttaattatcagtttgttatgaatgaaagtgcgtatgtggcttcgttaacagactgagtaaaggagtatatagcctgtaatctaattgaaacataaacgaaatatatacagtgggattttcattcggtgatggcgacgcggtctctgcgtggcgatatttctcttcatcgctcacaattcactatctccccggcacgactttcattaaactttgcgcggttttatttaaataagagatttcatgcacaattcttcgctttcaggcaaacgcctcggacgtcaggcgctgctctttccgctgtgcctggtgttatacgaattcgccacctatatcggcaatgacatgatccagccgggaatgctctcggtggtggaagagtttggcgtgggcaatgagtgggttccgacctcaatgaccgcctatctggccggcggtatgtttttgcagtggctgttggggccgctttcggatcgcatcggccgccgtccggtcatgctgaccggggtggtatggtttatcgtgacctgcctggcgacgctgctggcgcagacgattgagcagttcacgctgctgcgctttttgcagggcatcagcctgtgctttatcggtgcggttggctatgcggcgatacaggagtcttttgaagaggcggtgtgcatcaagatcacggcgctgatggccaacgtcgcgctgattgcgccgctgcttgggccgctggtgggcgcggcctgggttcatctcctgccgtgggagatgatgtttgtcctgtttgccgtgctggccgctatcgccttttttgggctacagaaggcgatgccggaaaccgccacccgcattggcgagaagctatcggttaaagagctggggcgtgattatcgtgaagtgctgaaaaacctgcgctttgtcgccggcgcgctggccaccggttttgtcagcctgccgctgctggcgtggattgcccaatcgccggtgatcatcattagcggcgagcaggcgaccagctacgagtatggtctgctgcaggtgccgatatttggcgcgctgattgccggtaacctggtgctggcgcgccagacttcccgcaagacggtgcgttcgctgattattctcggcggctggccaattatgatcggcctgctgatctccgccatcgcgacggtggcgtcaacccacgcgtatctgtggatgaccgccgggctgagcgtttacgccttcggcattgggctcgccaacgccgggctggtgcgcctgacgctgtttgccagcgagatgagcaagggaacggtgtcggcggcgatggggatgctgcaaatgctgatctttaccgtgggtatcgaagtgagcaagcacgcctatgaggctggcggcagcggactcttcagcttgctcaacctgctgagcggggtgctctggctggcgatgacggtctactttctgaaggataaacgcgtaggcagctccctcgaaccgcagtaatcttcacatgccctgctgcgacgttacgcgccgcagcaggcgcgccctcaggcgaacggcgcttcgcgattaagcactttatcaataatatgcagtacgccttcttcgttattgtgcggcgcacgatagccagcaacggccttcaccggcgcggcggcgttggccatcgcgtaaccgaatccggcatgctgcagcatttcaatatcgttgccgctatcgccaaaggcgaccacttcatgattgtcgatcccccagcgctcctgcaggatgcgcagtccgttagctttgtgtaccccaggaataatcaggtcaatgctgccgtagccggtagcgaccgcggtcaccatatcgccaagcgcagcgtgcagcttcggctgtatctcagggatcagctggtccgggacgttgagaccgaacttcagaatctcatcatcagcaatatgattaaaatcgtcgaccagttcgaggcgatgatagtactttgccgcgaccgctttcagcgcatcgttatagcggttgagggtataagcgctgcgcttaccgcaggcgataatttcaatgttggtcagcgtctggagatgatcgatgacggtattgaaatgctcctgcggcatccggcagttaaatacatcttctccggcgctgaccacccagccgccgttttcggcgacaaaggcgatctcgtgcgctacctccgggaagaaggagataagctggtaatactggttgccgctggcgacgacgaagcggatgccctgctcgcgcatccgttgatactgggcgaggaagcgctgacggttataggttttggcatcgctcagaaaagtgccgtccatgtctaccgcaatcattttgatgctcattaactgttctccatcacgggttcagattgtggcttcgctaccgcgcgagcgacgatggccgcgaccagcacgagtgccagcaccaccatcatggcgctgcgcaggccgaagtgttcgccgagaaagcccagcagcggcggcccgacgaggaaggcgaggtagccggtaatcgccaccacgctgacgcgcttcggcgcatcggggccggtgtcgctggcggcagaaatggtcagcgggaagcccagcgacgcgccgagaccccataatagtacggagagaccggcgacccacgggttatcgacgaaaataatcaggccaatgcccagggcgcccattaccgcgctggcgcgaaccaccgtcacccggctgtagcggtcaataaaccagccgccggtaaagcggccaagggtcatgccgagggtgaagcctgcgtaaatcagcgagccggaggttgggctgaagccgtggccgtcaaccatcagcagcggcagccagtcgttggcggagccttcagcaaaggccatggccaggacgatcgcgccaatcagcagcagctgggcatcgcgccatatcggcaggcctttgccttcatggcgcgccgcttccgccgcatttttgccggtgccttcagggatcgcgcgaatggcgatagcaatgggggcgacggccaccagcgccgccagcaggatgtgcggcgcggcgggcaggccgaagccggttaccgccataccaatcccggcgccgacgagcgtaccgaagctgtagaaaccatgcatcatcggcaggacggttttattcatctcacgttcaacggcggcgccttcgacgttaatggccacttccgcggagccaaagctggcgccgaagatggctaagccgatagcaaacagcaccgccgaggtaaaccatagcgcggcgctgagcaccagcatgccgaccaccgcgcaggacatggtggcgcgaatcactttacgggtgccgaatcgattgaccagccacgctgagcagaggatgccgctcatcgaacctattgatagtccaaataatacaatccccatttccgccgtcgatagcgcgagcagatcgcgaatcgccggcgtgcgggtcgcccatgaggccatgagtaatccggggataaaaaagaacatgaagagcgcccacagccttagctggagggctctgcgggaggtttgcgctgtcatccgtaaatgcccgagagtgaagagatgcagacaacagtagcaaggttgtgtacatttgtacatccaggcaggctgccgcggaatgcttttttattgacctctatgattcgattcagcctgaggcatatttgacgcgtacgccgtgggattcagcatctgttttaatgaaagaggaaaaggggatggcccgtcgaccaaacgacccgcagcggcgggagcggattttgcaggcgacgctggacacgatcgcgatacacggtatccacgcggtcacgcaccggaaaatcgccacctgcgcgggcgtgccgctgggctcgctgacctactatttcagcggcattgaggcgctggtcgaagaggcgttcagcctgtttaccggccagatgtcggcgcagtatcagcagttttttgccgatgtgcatagccgcgaagaggcctgtgacgccattgcggagctgatttttagcgcccaggtgaccaccgcgcgcaatatggagctgatgtatcagctgtatgctttttgcagcagccagccgaatttaaaagcggtcatgcagaactggatgctgcgcagccagcggacccttgagcagtggtttgaaccggccacggcccgcgggcttgacgcctttatcgaggggatgacgctgcacttcgtgaccgacagagcgccgctatcgagagaagcgattcgactgatggtagaccggctggcgggagcgtgagcggggcgcagaaaacaaaaaaaatttatgtaaattggtcaatgaaaacaattagttgcatgatggtcaataagttaggtgagtggtaaggagtggcgatcacggggcaatgccaaccgctgctgccacttggctcatcgtgacttattttaaacgccagggacctttctcctcgacttgctccacagctccttctgactcaagttcgcgaaggagggctacagcccaatattgttgctgtgtactgggggctttaggataatcccccaatcgagaccgcagagacgaaatacttctgcttgcttcactcctttaccatttatgcttccatccgggtgctttgccaaagcagcaagagccagttcttttgctttagcgcgaagttctagcccctgtatctgtaactcattcataatcatattattcctgataatcaagaccgtcttaataatactccgttgcaggctcatctccatagcatgagcaaaaaaatgattaggaaaatgagcgctgggcttcgtttggttaaaccgacgcgccggaaaggatacgggtagtagattaaagattagctgagaccgcagcttgaatatgagttgaagtccaaaggttttgacggcaacgagcaggatattgatttactgctgcgtggcggaagtattctattattggcaggtttacgccttttctaccgaaaccaggctttgcatgaagacgataaatgtcggtagtggttagaacttatggcccagctagttgccagctcggattgtgcgataacgataaggagactgccattccgtggttgtcagaactgacgagcgatctagttactaggttgagtaagtacgggtaggcaaggatgaaagcaagcattagccgttttgcgtcatttgtaacgttctccaaaaggacgcaccagcgtttgagaaggagtgcatgtctatggtgcaggatttgcatgatctaaaaaggatcgtaatggtccaaaatcgcctgggttgtcgggttttcaggcccatcatgtatctgcatgaaaacaacttcacaaagctggcagacgtggcggggatttgagcgcgcgcaacgtaagttaatgggaaacgttgcgattgaaggtgttttgattttgtgcaaatctagtatctcttcatactcggtgagactcagcaatggaaagtaatgcaaactctaagaaaaaaatcgattctgggaaccaaagattagcatccttattagatgacgttacccgtggaaacatcaagatcccggctttccagcgagattttgtttggacagatgaacaaatattagggcttatcgactctatttatagtgggtatccggttggttcattattattatggtcgactaaaactccattgaaatttgaaaggaatgtaggtgggtttcatctccctgaggtcaaagaggattatcctgtaaattatgtgttagatggacagcagcgtttaacaactttgtttggtgtgttcaatgcggataggaaaacagaaaacaatgaattagcatcacgatttaatatacattttgttccttccaatgacgaattctgtaattacaaagatctgccgaatggtgttagtagtgttccactaagtagtattcttgatactgcgaaacttctgccggagttgaggcgattcccagttgatgaacaagataaaattgctaaccttgtagataaatttaaagattatgagtttcctatagttacgattaaagaaagaagcaaccaagaagtttgtagaatatttcagaggattaactcatctggaacaagtttaagtaccattgagctgctgactgcatggacatggtcagaaaaattcgatttacgcacagagatggattcattaaaagattatcttgcatctgtggggtatgaacaagtcgatgaagtccttttaatgcgttgtttgaccgcaataatcaataaaaaaatagattcagatactttgattgatgttgatccaacaattcttttatcctcaatggaggatttaaaaagaggtgtgcgaagttctgttgattttttagcaaacgatttaaaaattaagaattctatattcttacctttccctattatgttagttccgataacctatttcttcgctaaaaccgctcgacctacaggacatcaatatagttctattaagcgatggttttggtgttgtgcattttcacaaaggtataaagctgggacaaatacttatgttatggaagatattatctctatggagggtataataaattcacctgatagctatattcaaccaataccaaaaattgaagcggatttctttaaaaaaacatggcgaataaactcctctgctgcaaaggcctccatttgtttattagctcaactatctcctcgaagtttcattactggtaaagtggtagatcttgattctgcattgtcagcatataacgcaaggcaatttcatcatatttatcctaaggcataccttgctaagcaaggttttgcatttcatgagtcaaatataattgcaaatatagcgtttttaacggctgaagataataataaaatttcagattcaaaccccgatacttattttaaagcagtacatgaggcagagaaagatttgatttttgatgcagcggtaattgatgaaaaattacgagatggtaaaagttcttatggggagtttatcaatcagcgtgaaatggatttaaatgatcttgcttcaaaagcaatgacagggaaaatatagtaagcagtaaaatatgtttgctatatttaaaatattggatgtctttctttgaaaggaaacttactggaaaggatgacatccttgtttgttcaattattctttcccatcaaccttcgttgaattggctctaattcattttccacaaatactatacttgccttcttcacagccccaactccaatattgatcggtataatctccttcagcttagatggcatgcggtgtgctgccataatgtcattgcggctaacatttttaatattcagaaatacatcctatgccttctggctataaatgatgaggtggaaactgtcacctgtgacatcctgccgcaatggctaattgtattataaattatgttaaatattcataacttttcttgatttctaatttattaagctttgtgatttttctgtttatatataaatcaataaacatagctactcctaacatagtgaaacatagtaatgatagataaataattggcgttatgactataagtgcaagggagtttttattagtctcttttgataactcatcttttttttgtggatctaacatataactacaaataaatagttttgtttctggtttaattaacgtgattttatccaatttgtttttatcgatgcaagtttctggcgttatatcccacgcaggagtatccggtgggcttgttgccgctcctggttttatccaaaatgagtcatttgtttctttgtgtgtatgggaaatccagtatattggctcaacggtaatgattttagtgaactgataaaaaccaattaagggaattgctataacaatgatgccaagagtagtgagggtgattttttctcgtttaccgtgtggtttagtactaactttgtacttgcaaaggctaagcctaattatcggttttgctaatccgatggtggatactaaaaaatcctcttcaggatggattttatttagccatgaccaaaaggaagagactcctcctgcgagccatttaaatatcaatcctccaattgccgtagcaagaaaggcatttattttatcgaaatccatatatctttccttctcaattaggtattcgagattatatatatcagagaccaaacaatgaagtgaagttcattaaaaattcaatcgcgggcattctgacactatgaatgctcaattagccgaaatcataggccttatcatcaatctgattcgcaattgcattgtgactgaagtggaccgggacgactggctttgctgggtggaaactggggccttgaaaccagcgggattaactggctgacttaccgcgccagttaatcccgcacctacgtgtaaatgccagttaaggtcatcgactttaatcaacccatcgataatgtgaactaggctatcacagcgttaacgcatacggtcaaatccggactacgagtttaggaccagcatagatgtggatgtgtaaaatgatgatttgcccattatgtggaagtgcagcccatactcgcagcagtttccaggtctcttcaatgaccaaagaacgttacaaccagtgccagaatatcaactgcagccatacgttcgtaacgcatgagacttttgttcgctcaatttctacacctaaagaggcccatcctgtgcagcctcaccccacaaattcaggccaggctgcgctagctctttgaggctgtcgccactttgtcgccatgtcttaaaaagagggtttgtaactcaatgattttaaaggctgtaaaattcaggcaacaaaaaacccatcaaccttgaacctaagtggcggggttgatgggctccacaaaatggggacatcaaagaaaagcagtggcactacttatgactgatgccagcaaaaaaagttctgcgtatgcgcgttttttttcttaaaaaattcactgtagccccggccagatgatgacaatcagcgtacctgccagggttaacaacacgttagcgatggcgtaggtccccgcgtatcccagcgcaggaatattgctgcgcgcggtatcgctgatgatttccatcgccggcgcgcaggtacgggcccccatcatggcgccgaagagcatcgcccggttcatgcgcagcacgtacgcgccgaacaggaagcagataaccaccggcaccaggctgacgataaggcccgccgccagcatctgaccgccgacggcgccgaggccgttatttatgccggcgcccgcgctgagccccacgcctgccataaacaccatcaggccgaactccttcaccatattcagcgctccctgcggaatgtagccaaacgtcggatggttggcgcgcaggaaaccgagcataatgccggcaaacagcagaccggcggcgttaccgatgccgaagctgaacgagctgaactggaaggtgatcatgccgatcatcaggccaacgataaagaaggcgcagaaggcgagcaggtcggtcacctggctgtggatggagataaagccgatacgatccgcgacggttttaacgcgacgcgcgtcgccgctgacctgcagcacatcgcccttgttgagcaccacgttatcgtcgataggcatttcgatctggctgcggataacgcggtttaagaagcagccgtgatcggtcagcttcagctgcgccaggcgacggccgacggcattgtggtttttgaccacgatctcttcggtgacgatgcgcatatcgagcagatcgcggtcgaagacctctttgccgttacggaagcttgggtcgaggcgggcatgggcatccgggtaacctaccagggcgatatcatcgcccatctgcagcaccgcatcgccgtccgggttcgcgagaatgccgttgcggcggatgcgctcaatgtagcagccggtctggcggtaaatgcccagctcgcgcaggtttttaccatcagcccacgccaccagctccggaccgacgcggtaggcgcggatcaccggcagatagaccttgcgccgggagtcggtatcgaggccgcgctcgcgggcgatttgctgggcgctggtctgcaaatcctgatgctgcagcttcggcatatagcgggcgccgacgatcaggctgaccaggccaatcaggtaggtcagcgcatagccgaggctcagatgatcgagcgagagggcgagctggtcgctgggcatgccgaagtgccgtagcgtatccccggcgcccaccagcacgggcgtggaggtcatggcgccggcgagcatcccggccgtcaggccgatatcccagccgaagagcttacccagccccatggcgatcagcatcgcgctgccgaccatcaccagcgcgagcatcaggtaatttttgccgtcgcgaaaaaaaatgaaaaaaagttgggccccgcttccacgccgacgcagaaaataaacagcataaagccgagattgagggcatcagtgttaatactgaaatgctgttgccctaataatagggaaaccactaaaacgccaatggaattaccaagttgtaccgacccgagacgcagtttcccgaggcagagtcctaatgcaagcacaacgaacaataacaggatgtaattcccgtttaacaaatctgcgacgtttatattcacgaaagccaacttctcatttactagtaagttgttgaaggaaatggttatttggtctaaggttggtccagtgttcgcgttgtcccgaacgctattctggcatcccgttataaccagcaaaatatagtcgacagtttaatctttcctggaggctgcggctagtaacaatcgtgtttacattgacgggatcttttattggcatggattgccagaatctttatctgactgggcgaagtggaagttggttagaggcaaaatcaggaggatgtcgtgaaatctgagcgtgcttgggccggtattatctgtgggttctttctatttatcgtggtttgtttatcactactgttacatatgaaaggcgcctttcgggctaccggtcaccctgagctcgggctgctgttctttttgctccccggtgcggcggcaagctgcctctctcccgggcagcgggtgctgcgtccgcttatcggcgcgatgctggctgcacctgtctgtctggtggttatgcggcttttctttgtgaccgagcgttctttctggcaggaactggcgtggctgtttagcgcggtgttctggtgcgcgctgggcgcgctgtgctttttgtttatttgcgcctggcttgataccagacgcaggcactcgtcagaggagtgagccgtctcaggcgaacaggccgagattctctttcgcccaggcttcaaagtcagtgcagccgccaatgtgcttctgatcgacaaaaatctgcggtacggtttcaaccggtttacccacggttttttccaggtcggctttgctgatgccttctgcgtgaatatcaatatagcgatagttaaaatcatcacgctcgttgctcagtttttccgccagctctttggcgcgaacgcaataggggcagcctggacgaccaaaaattaccgtaaacatagtccttctccttaaacctcagccggatggcgaatgccgcgtatcatgccgcgttatgtcgaggagggaaagaaggttctgccttttgcttcgatggcttaaggctatgtttggtaaatattctgctgatgaaaccgctatactcccctgatacgcgaccggtttttgcccgggggcgtgcatgattttgaccggaggagcgttatgcgatcgcccgctgcattaccaaaaagcattctggtagtcgagattatcggcatggtgctgttgaccctggcctggctctcgctcaaccagtacgtcagcctgcccgcgccgttttccagcccaacggcggcgctgctgatgatcttcgcggggatcctgctgatgcttccggccgccgtggcgttaatgtggcgagtggcgaaagtgattgccccgcagttgacgcaaacgaaaaccccaccttcttcattgcctgacagagaaaaacgagatgacgccgaccattgagctgctgcgtagccaccgttctattcgccattttaccgacgcgccgataagcgacgaacagcgcgccgcgattattgccagcgcgcagggcgcttccagctccagttttttacaatgctcctcaattattcgcgttaccgacccggaaatacgccagcagctggtcccgctgagcggcggccagcagcacgtagcgcaggccgctgaattttgggtattctgcgctgatttcaatcgcaatctgcaaatctgcccggacgctcagctgggcctcgccgaacagctgctgctgggctgcgtcgataccgcgattctggcgcagaatgcgctggtggcggcggaatcccttggcctcggcggcgtctatattggcggcctgcgcaacaatatcgatgcggtgaccgagctgctgaagctcccgcagcacgtactgccgctgtttggcctgtgccttggctggccggacgataacccggaggtgaaaccgcgcatgccgtcggcgatgctgatgcatgaaaatcactatcagccggtggacgacgcggtgcttgcggaatatgacgagcagatagcgcagtattatctctctcgcggcagcaatacgcgtcgcgatacctggagcgaccatatccgtcggactattgttaaagagagccgtccgtttattctgcaatatctgcataagcagggatgggctacgcgctgattgcgtgtaaactgccctcggtctgacgcaaggaaattccgcaggtcagcgctaattgactaccagaggcccgccagagcgggtcttttcgcagaggtgcagggtgaaaattgccatattatcccgggatggaacgctttattcatgtcgacgcctgcgcgaagccgcgcaaaaacgcggacaccaggtggaaatcctcgatccgctttcctgttatatgaacgtcagcccggtggcctcgtcgattcactataaaggtcgccagctcccgcatttcgacgccgtgatcccgcgcattggcacggcgatcacctactatggtaccgcggcgctgcgtcagtttgagctgctgggcagctatccgctgaatgaatcggtggcgattacccgcgcccgcgacaagctgcgctcgctccagctgctggcccgtcaggggatcgatctgccgctcaccggtattgcccattcgccagacgataccagcgacctgattgccatggttggcggcgcgccgctggtggtaaagctggtggagggtacccagggcatcggcgtcgtgctggccgaaacgcgccaggcggcagagagcgtcatcgacgcttttcgcggcctgaatgcgcatattctggtgcaggagtatatcgccgaggcgaaggggcgggacgtgcgctgcctcgtggtgggtaatgaagtggtggcggcaattgaacggcgggcgaaggagggggattttcgctctaacctgcatcgcggcggcgtggcgtcggtggcgtatatcagcgagcaggagcgtgaaatggccatcaaggccgcgcaaacgctcgggctggacgtggccggcgttgatatcctgcgcgccgcgcgcggtcctctggtgatggaggtcaatgcttctcctgggctggaaggaattgaaaccaccaccggcgtcgatattgccggcaaaatgatcgcctggatcgaacgacaagccacgcccggattttgtctgaaaatgggcggataattccctttcacgacaccgtcatggtacaggacgctttttttgcgtaagctatggcgtcgcatttttcacagtaagaggtcacaggtcatatggattcactggtcgttccgggtcttgatacgttacgtcaatggctcgacgaattgggcatcagcttttttgagtgtgattcctgccaggcactgcacctgccgcatatgcaaaatttcgaaggcatttttgatgccaaacttgacctggtggataacgtggtgcttttctccgcgctggcagaggtgaaaccctccgcgctgctgccgctctccgccgatctttctgcgattaacgccagttcgttgacggtgaaagctttcctcgatattcaggatgataatctgccgaagctggtggtgtgccaggccttgaccgtaggcgtcggcgtgacgatcgatcagttcgcgtggtttttccgccagagcgaagaacagatatcgatggtcatcctcgaagccagcgccaatcaggtgctgtataaatctgaggaagaagagccggtggctgagaatattcagtaccattttcttcactaagcctgtcgaaaaatagcgcagccactgccatagcggctgcgtattacatgcttttattctgctattaaccttccgtaaaagaatttttcaccgccattccgccgctttcggcttatcacatagacccttattgcataaaaaattgataaaagccgtttttttacctgggctatagcctcttattctggctacagttattctgacgctgcttccagttgcgggcaaccattccgggagaggtcctctctccttttcttaggcaatgaaaaaatatgcatgattattgcatgcgaacaagtgcgtatattcagcccgcttgttaacgggcattgagaaggaataagagatatgaccgcctttggtaaaaaatggttaacaggtctggttacgggtgcgctgatggccgtttctgccggttcgctcgcagccgaacaaaaaaccctgcatgtttataactggtctgattatattgcgccggatacggtggcgaattttgaaaaagagaccggtattaaagtggtgtatgacgtctttgactccaacgaagtgctggagggtaagctcatggcgggcagcaccggttttgacctggtggtgccgtcggcgagcttccttgagcgccagctggcggccggggtgttccagccgctggataaaagtaagcttcccaactggaaaaatctcgatccggaagtattgaagctggtcgcgaagcacgaccccgacaataaatacgcgatcccgtacctgtgggcgacaaccggcataggctacaacatcgataaagtgaaagccgtgctgggcaaagatgcgccgctggacagctgggatctggtgatgaagccggaaaacctggaaaagctgaaaagctgcggcgtctccttcctggatgccccggaagagattttcgccaccgtgctgaactatctcggcaaagatcctaacagtactaaagccgatgactacaccggcccggcgaccgatctgctgctgaagctgcgtccgaatattcgctatttccactcctctcagtacatcaacgacctggcgaacggtgatatctgcgtcgctatcggctgggcgggcgacgtatggcaggcggctaaccgggcgaaagaagcgaaaaacggggtgaatgtttcctactatattccgaaagagggcgcgctggcgttcttcgacgtcttcgccatgccggcggatgcgaaaaacaaagatgaggcttatcagttcctgaactatctgatgcgtccggaggttatcgcccacatcagcgatcatgtctattacgctaacggcaacaaagcctctgttccgctggtcagcgaagcgatccgcaataacccggccatttacccgccggctgacgtcttcgccaagctgttcaccctgaaagtccaggatccgaaaatcgaccgcgtgcgtactcgcgcgtggacgaaggtgaaaagcggtaagtaattctccgtgagttgtaggccggataagcgtcgcgctgccggcaacaggcgcaccgcgatggtgcgcctgcaccatgatttgatttctgccggagaacaccccgtgaatgatgtgattcctcgcccgcaggcgaaaacccccaaagcgctgaccccgctgctggaaatccgtaatttaaccaagtccttcgatggccagcacgccgtcgatgacgtcaatctcaccatttataaaggcgaaatttttgccctgctgggcgcatccggctgcggcaagtcaaccctgctgcgcatgctggcgggatttgaacagcctaccgccggacagattgtcctggatggcgtcgatctggcgcgggtgccgccgtatcagcggccgattaatatgatgttccagtcctacgcgctgtttccccatatgacggtggagcagaatatcgcctttggcctcaagcaggacaaattgcccaaggccgaaatcaccagccgggtgcaggagatgctggcgctggtgcatatgcaggagttcgcaaagcgtaaaccgcatcagctctccggcggccagcgtcagcgcgtggccctggcccgcagcctggcgaaaagaccgaaactgctgctgcttgatgagccaatgggggcgctggataagaagctgcgcgacaggatgcagctggaagtggttgatatccttgagcgcgtcggcgttacctgcgtgatggtgacccacgatcaggaagaggcgatgaccatggcggggcgtatcgccattatgaaccgcggtaagttcgtgcaaatcggcgagccggaggaaatctacgagcacccgaccacccgctacagcgcggagtttatcggctcggtcaacgtctttgaagggctggtgaaagagcgtcaggaagatggcctggtgctggactctccgggcctgacccatccgctgaaggtcgatcccgatgcctcagtcgtcgataacgtgccggtgtgggtggccctgcgcccggaaaaaatcatgctctgcgaagacccgcccgcggatggctataacttcgcggtgggcgaggttatctatattgcctatctcggcgacctgtctatctaccatgtgcgcctgaaaagcgggcagatgctgagcgctcagctgcaaaacgaacaccgttaccgtaaaggggctcccacctggggtgatgaggtgcgtttgtgctgggatgccgatagctgcgtcgtgttgacggtgtaaggagagggcgatgagtacattagaacccccgtcaggcgtaaaaaaacctggcggttttgcgctgtggctggcgcggctgcagatggcccacgggcgcaagctggtcattgcgctgccctacgtgtggctgatcctgctgtttctgctgccgttcctgatcgtctttaaaatcagccttgcggagatggcgcgggcgatcccaccctataccgacctgctggagtgggccgacggtcagcttacgttaacgctgaatctcgggaatttcctgcagctcaccgacgatccgctctattttgaagcgtatctgcaatcgcttcaggtggcggcgatctcgacgttctgctgcctgctgttggggtatccgctggcgtgggcggtggcgcacagtaagccatcgacgcgaaatatcctgctgctgctggtgatcctgccgtcatggacctccttcctgatccgcgtctatgcctggatggggctgctgaaaagcaacggcgtgctgaacaacttcctgctgtggctgggggtcatcgaccagccgctggagatcctgcacaccaacctggcggtctatatcggtattgtttacgcctatctgccgtttatggtgctgccgatctataccgccctcacgcgtatcgattactcgttggtggaggcgtcgctggatctgggtgcccggccgctgaagaccttcttccaggtgatcgttcccctcaccaaaggcgggattattgccgggtcgatgctggtgtttattccggcagtcggggagttcgttatcccggaactgctgggcgggccagacagcattatgattggccgcgtgctgtggcaggagtttttcaataaccgcgactggccggtggcgtctgcggtggcgatcgtgatgctgttgctgctgatcgtaccgatcatgtggttccacaagcatcagcaaaaacaggtgggggaacacggatgaataatttaccggtagtccgttcgccgtggcgaattttgattctgctgctcggctttacctttctgtatgccccgatgctgatgctggtgatttactcattcaacagctcaaagctggtgacggtatgggcggggtggtcgacgcgctggtatcgcgagctgtttcatgacgatgcgatgatgagcgcggtaggcttaagtctgaccattgccgcctgcgccgcgacggcggcggtgatcctcggtaccattgccgcagtggtgatggtgcgttttggccgcttccgcggttcaaacggctttgcttttatgatcaccgcgccgctggtgatgcccgatgtgattaccggcctgtcgctgctgctgctgtttgtcgcgctggggcattcaattggctggccgtcggatcgcggcatgctgaccatctggctggcgcacgtgaccttctgtaccgcgtacgtcgcggtggtcatttcatcgcgcctgcgtgagctggaccactctattgaagaggcggcgatggatctgggcgccgcgccgctgaaggtctttttcgtcattacgctgccgatgattatgccggcggtggtctccggttggctgctggcctttacgttgtcgctcgacgacctggttattgccagctttgtttccgggccgggggcgacgacgctgccgatgctggtcttctccagcgtgcgcatgggagtcaacccggagattaacgccctggcgacgttaatcctcggcgtggtcgggattgttggttttatcgcctggtatttgatggcccgcgcggaaaagcagcgggtgcgcgatatccagcgtgcaagaagcggctgaaccacctaaaatctgcaatagagttaacatcggcgccgcatttgtggcgccgttttcatggaagactttacgttgggattgtttactaaaacgcgttcctctcatgctcgtcttaacgttcctgcgctggtgcaggtggcggccttcgccattattttaatccgcggcctggatttgctgatgatcctcaaccagcttggcgttcagggaatcgcggattttgtccatcgcagcgtgcagacctgggcgcttaccctggtgtttctctcaagtctggtgctggtatttattgaaatctggtgcgcgttttcgctggtaaaagggcgcaactgggcgcgttggctgttcttgttgacgcagattatcgtgattggctacctgtgggccgcttcattgggctacggttatcccgagctgtttagtattgccggggaatcgaagcgcgaaatctttcgctccctggtgctgcaaaaactaccggatctgctggtgctggcgatgctgtttgtgccggccccgtgccgacgctttttccgtttacagtaacggtgatacaatccccgcccctgtttttttgaaggtcttgttatgcattgcgcactttatgacgcgggtcgctgccgctcctgccagtggctggaactgccggtatcccaacagctcgccgataaaatggccgatcttcgcgcgcttctcgccgatgcgcccgtcgctgaatggtgcgcaccggtttgcgggccggaaagcgggtttcgcaacaaagcgaaaatggtggtcagcggtagcgtggagcgcccattgctcgggatgctgcaccgtgatggcgccccggaagacctgaccgactgtccgctttatccgcaaagcttcgcgcccgtcttcgctgcgctcaagccgtttatcgcccgcgccgggctcacgccctataacgttgcccgcaggcgcggagagctgaagtacattctgctgaccgaaagccggctcgacggcggtatgatgctgcgctttgtcctgcgctcggagagcaagcttgcccagctgcgcgccgcgctgccggagcttcaggcgctgctgccgcagctgcaggtgattaccgccaatattcagccggtgcatatggccatcatggaaggagagcgggaaattttcctcaccgaccagcaggcgctggcggaaaatttcaacggcgtgccgctgtggatccgcccgcaaagcttctttcagaccaacccggcggtggccagccgtctgtatgccaccgctcgcgactgggtgcgccagctgccggtcaaccatatgtgggatctcttctgcggggtgggcggctttggtctgcacagcgcaacgcctgagatgcgcctgaccgggattgaaattgccccggaggcgatcgcctgcgcgaagcagtccgcggcgcagctcgggctgaataatctgcattttcaggcgctcgattccacgcagtttgcgaccggcgaaggcgacattcccgatctggttctggtgaatccgccgcgtcgcggtatcggcgacggcctgtgcgactatttaaaccgtatggcgccaggctttattatctactccagctgcaacgcccggacgatggcgaaagatatcgctcgcctggccggttatcgcattgagcgggtccagctgttcgatatgttcccccataccgcccactatgaggtactgagcctgctggttcgcgaagtataaacaaaatgtgaactcttcaggcggtgaagatcgggtaagcttggctaatcagaacgtaagaatagcggagtgctgccggtggcaaaaaaaatcctgttggttgaagatgatgaagatatcgccgcgctgctgcgcctgaatctgctggatgagggctatcagattgtccacgtggcggacggagcccaggccctgcgcctgctggaaaaagagctttgggatgcggtgatcctcgacctgatgctgccgggcgtagacggtctggaaatttgtcggcgcattcgtcagcaaacccgctatctgccggtgattattatcagcgctcgcgccagcgaaacccagcgggtacaggggctggagatgggagcggatgattatctggccaaaccgttttcgattctcgaactgaccgcccgggtcaaagcggtgttccgtcgtcaggaggcgatggggcagaatctgctgatggatgccggccgtatcgccagccatggtttaagcattgaccccttgtcgcgcgacgttaagctgcgcggcgagacggtggatctgacgccgcgcgagttcgacctgctctactactttgcccgccatccgggggaggtcttttcccgccttgagctgcttgatcgggtgtggggctatcagcacgacggctatgagcatacggtcaatacccatatcaaccgcctgcgcaccaaaattgagcgcgacccggcggagccggacatcattctgaccgtctggggaaaaggctataaatttgccgtggagcgcaaagaggcgcagccatgatccgccgtctcagcctcagccagcgcctggcgctggtgtttacctcactgctgctgctctgtgccatagccgtttgtctgatccagctgtacagcagcgcgcagtacggcaacgtcatggtccagcgtctctccgccgggctggcgcagcagatcgccgcccgcgagccgctgctggacgctcaggggcaggttgatcgccggatgctgaagccgctttttgatcggctgatgaccttcaatcccagcgtagagctgtatctgctttcgcccgacggcgagctgctggccgacgccgcgccgccggggcatattaagcgccagcgcatcgatctggcgccggtgcaaacgttcctgtccggcggcgcctggccggtgtacggcgacgatccgcgcagccttgataagcaaaaggtgtttagcgtggcgccgctgcgccaggacggccagctgcgcggctatctctacattatcctgcagggtgaaacctttaatgaactggcggcgagcgcctggcagaaaaccttgtggagcctgctgctgtggactctgctgctggtggccggtctcggcgggctggcgggctggcttgcctggttctgggtaacgcgcccggtgcgtcagctcaccgcgctggtggcaaccgacagccaggacagtattcatgcgataaaggcgctggcggcgcaaactccggaggcgaacccggggaatgaagtggccgtgctgcataatcgctttattgaactggctcgtcagattgccgggcagtgggaccgtctggccgacagcgatcgccagcggcgagaatttgtcgccaatatctcccacgatttacgcacgccgctcacctctttgctgggatatctggaaacgttaagcctgaaggccgatcgcctgacgatggaggagaacaagcagtatctgaatatcgccctgcgccaggggaacaaggtccgccatctttctcagcagctgtttgagctggctcgcctggagcacggagggattaagccgcagccggaaaccttcgtgctggctgagctggtgcaggatgtcgcgcaaaaattcgacctggcaatcgcgacgcgcaatatcggtctacggctggatctggccgccgggctaccgccgataacggcggatctctcgatgattgaacgggtgctgactaatctgctcgataacgccattcgccatacgccggaaggtgggcttatccgcctgacggcgcgtcgctcagggccggaatttatcgtcgaggtggccgatagcggaccgggcgttgccggtgagctgcgggcaacattgttcgaacggccttcggtgcttgaacctggcgcgcaaagcgcatcacgagggggactggggttgatgattgtgcgacggatgctgcagctgcacggcggcgatattcgcctgcttgaagcgccggcaggggcctgtttccagtttaccctgccggtttaaggtggcggattggccgatcgggcggtctatcgccgcctgctaaacggtagcccgggtaaggtgtttacgccgcaacccgggaaatgcgcctgggttgaggctttagtgcggcttcttcccgggccgcgctgcgcttgcccgggctacggcgactgtctgcgggccggtgcccgggtaaggcgtttacgccgcagcccgggaaatgcgccgggattgaggctttggtgcggcttcgtcccgggccgcgctgcgcttgcccgggctacggggccacggctgtctgcggaccgatagcccgggtaaggcgtttacgccgcagcccgggtagtgcgccgggattgaggctttagtgcggcttcgtcccgggccgcgctgcgcttgccccggctacggcgactgtctgcggaccggtagcccgggtaaggcgtttacgccgcaacccgggaaatgcgccgggattgaggctttggtgcggcttcgtcccgggccgcgctgcgcttgcccgggctacggggccacggctgtctgcgggccggtagcccgggtaaggcgtttacgccgcaacccggggaatgcgccggggttgaggctttggtgcggcttcttcccgggccgcgctgcgcttgcccgggctccggggccacggctgtctgcgggccggtagcccggacaggcgcgtcaagcgccgcctccgggaaatgcttactccgggaaccactgcttgctgattttctcgtaggtgccgtcggctttaatcgccttcagcgcggcgttcagtttttccagcagcgctttgttatccgggcgtaccgcaatgccgaggccggtaccgaagtactgcgcgtcggtgactttcggcgttgccgcgcccagctgtgggttggttttcagccactcgttgaccacggcggtatcgccaaacaccccatcaatacggccatttttcaggtcgataaacgcattctggtagctatcgtaagccacggttttcacttccggatgtttatcctgcaggtatttctggtgcgtggtgccgttttccatcccgatacgtttgcctttcagatcggcgaaagagtggaaggcatctttcttcgagataaccagcgcggagttagcgtagtacgggtcggtaaacgccacctgcttgctgcgctccggggtaatgtccatgccggagatgaccgcatcatatttcttgaatttgagcgccgggatcaggctgtcgaaggcatggttggtgaacgtacactcagcctgcatctgcttacacagcgcgtttgccagatcgatgtcgaaaccagcgatctggttattggcgtccatcgattcaaacggtgggtaagttgcagaaacgccaaagctgattttttctgcggcagcggcgccaaaggcgaaagtgctaagcagtgcggccagaactaactttttcattgtggaactcccgtcggtcaatcttatgatgttgtgccgtgtctgcggctgggagtaacaatgccactaaatgaatttatattcaataatcatggatagttattttaattgaaataaaaaaagacggataactcagtgagcttatccgtctttatttggctttttatgcgtttttaattacgtcgctcaaaggccagcgctttatgttccaccaggcgcatcagcagcgtcagcaggccattgaccaccagatagacaatgccggcggcgccgaacaccatcacatcataggtacgtccatagagcagctggctgtggcccatcacttccatcagggtaatggtgtaggccagagacgtactcttgaacaccagcaccacttcgttggagtaggaggagagggcgcgtttaaaggcgtacggcagcaggatcgccagcgtatctttcttactcattcccagcgcgccgcaggattgccactggccatccgggatggcgcgaatggcgccataaaacagctgcgtggtataagcggcgctgttgagagaaagggcgatcagcgcgcagagccagggttcggaaatcagatgccagagtaccggatattcctgcagcgacgggaactgtcccgggccgtagtaaatcaggaagatctgcaccagcagcggcgtgccggtaaacagcgtgatatagccgcgcacgatccacaccagccccggcgtttttagcgtcagaatgatggtgaagatcagcgacagaatcagcgccacgacgatagaggctgcggtcagcgtcaggctggtatgcagcccttttagcagttcgggtaagtaatcaagcatcagcctggtctccgttcgaagcgcgtcgcacgctggtcaatacgtttcagaatgtactgactcaacagggtgatgaccagatagattgccgccgcgatgatataccagttaaacggctcctgggttcgggtggcgatgcttttagtttgcagcatcagatcgttgacgctgatcaggctcaccagcgcggtatccttcagcagcaccagccactggttgccgagtcccggcagcgcgtggcgccacatttgcggcatcactaagcgaaagaaaatagcggctttcgataatcccagcgcctgaccggattcccattgcccctgcggaacggctttaagcgctccgcgcagggtctgcgatgcgtaagcggcatacagcagagaaagcgcgatagccccgcagaggaacggactgacgtcgaagttttcaatctgcatctgtaccgggatctgcactatgccgagattgatcgtaaaaccatcagaaagggtcagcagcagctgtgaggaaccaaaatagataaacagaaccaccagaatttccggtagtccgcgcaaaagggtgacaatgccggttgcgagccaggcgaccggacgcagctttaccgactcgaggacggcaaagagcatcgccagcaccaggccgatgatcagggcgcaaacggcaaggccgacggtcatcccggcggcgcttgctaatggaaaaaattcgttcattcagcgttacttctggaaccatttgttatagatagactggtaagtcccatcgcttttcactttttccagcgcagcgttaaatttctgctgcagttcggtattgccctggcgcagcgcaatgccgagaccggtgccgaagtagtctttatcggtcaccttgtcgcccaccgcggccagcttcggattgctcttcagccattcggtcaccacggcggtatcgccgaatacggcatcaatacggccgttctgcaggtccagcttcgcattctggtagctgtcgtaaggaacggtcgtgatttccgggtgtttgtcggtgatgaatttctggtgagtggtgccgttctgcacgccgacttttttgcctttcagggcgtcaatgctggtgaatttaccctgctggccgacgaacagcgcggagttttcatagtacggggtggtgaacagcacctgtttttcacgctcaggagtgatgtccatcccggccatgaccgcgtcgaaacggcggaacttcaggctggggatcaggctatcgaaagcctggttggtaaaggtgcaggtggcatcaatctctttacacagcgcgttcgccagatcgacatcaaagccgacaattttgttattggcatcgatcgattcaaacggagggtaggaggcctcggtggcgaaacgaatggtctgggctgcggtagcggagaggctcatgcccgcaagaagagcggcaatcagtacttttttcatcgtcatttccccgaaaacatcaatgtgaaagatagtttttaaacgcgtcggtctgcggatgcgcgaagcagccggcatcaccttgttcaacgatatggccattttccatatagaccacgcggctggctgttttgcgcgccacttccacttcgtgggtgacgataacctgcgtaataccggtttcagccagttcgcggataatactgacgatctgggcggtgatttctggatcgagcgccgccgtgggttcatcgaacagcagaacctgcggttccatcatcagggcgcgggcaatagcgacgcgctgctgctggccgccggaaagatgcagcgggtagcgatcgctatagggtttcaggcgcagacgttcgagcagcttttcagcgcgggctaaagcctgatctttgctcaaaccgagcacgcggcagggagcttcaatcagattttgctgcacggtcagatgcggccacagattgtactgttggaacaccatacccacgttctggcgcagctcgcgaatggctttgtcagaaggcgctttggtaaagtcgaaatgatttccagcgatatgcagcgtaccggaacgcggcatctccagcagattgaggacgcgcagcagcgagcttttaccggcaccgcttgggccgagcagcaccagcgtttccccctgcgggcaatccagcgtgatgtcgaacagcgcctggtgtgcgccgtagaagcaattaatgccgtttaattttatgctcatctgggcagtctgatacatatagcaattgaggccgcaaatagtacctttggcagaatagttatgcaatatttatgcgttaaaagttaaatgtaaaccatgtttacatttaaagttagcacaaaatatggcttcgtgaaggtgggataagtcaatgtcggcattaccagcggaaatgccgacattttaccggggttatttcattcggcccgagcggcccaacgcctgaattagcgtttttccagactctgacgcagggtgcccgccggcgcatgggggttgttgccgaggtagcgtacgtcatccacggcccagcactggccttcctgaatcatcagcacttcgtctttccagctttgggtgccctgtttcagctccacgcgcaggggaatattgcgcgcgtcgcgattagggatggtggaggcgctggcgacatcggcgctgtcggctggcgttgggctactggagaaaagatttgactgcagcagggcgttgttagacgggtcctgacgcgcgtcgttcagcagttttgccagaccgtcgctcaggtatgggcgcagcgcggttaaatcgctgttgcggtgctgtacctggtagtcataaaacttctgcgctacgtcatccgggccgccttcgatgcaggggccgctgcgggtgccgttatctttgtacgcaggcgtgacggtagtacaggcgctgagcgccagcgcgcaggggaggactaatgcaagaactttgtagcgcatgatgatttccttatgagctcactacgttagaatatcttttcaagcatagtgtatcagatagggattgtgcttgacccttagagctaacgcattgaacgctaaagaaggagtttcatcatgcaattttccaccactccgaccctcgaaggtcagcccatcattgaatactgcggcgtcgtcacgggggaagcgattctgggcgccaacgtattccgcgattttttcgccagcatccgcgatatcgtcggcggtcgttccggcgcctatgaaaaggagctgcgtaaggcccgtgaaattgcgtttgaagagctgagcgagcaggcgaaggcgctgggcgccaatgcggtggtcgggattgatattgactacgaaaccgtcggtaaagatagcagcatgctgatggtcagcgttagcggcaccgcggtgaagacccgccgatgagaacttgccgggcaggcgtactgctggcgctgctgctggcgggctgcgccagcgaaaaaggtattatcgatcgcgatggctatcagctggatacgcgccatccggcgcaggcggcatatccgcgcatcaaagtgctggtgattcactacaccgccgacgatttcgacgtttcgctggcgacgctgacggataaccaggtgagctctcactacctgatcccggagaaaccgccgctgcacggaggtaaaccgcggatctggcagctggtgccggaagaggaactggcctggcatgcgggcgtcagcttctggcgcggcagcacgcgcattaacgacacttcgattggcatcgagctggagaaccgcggctggcaaaaaacggcgggggtgaaaagctttacgccgtttaatccggcgcagattgacgccctgatcccgctggcgaaagatattatcgcccgctaccacatcgcgccgcagaacgtggtcgcccatgcggatatcgcgccgcagcgcaaagacgatccggggccgctgttcccgtggcgcaggctggccgagcaggggattggcgcatggcctgatgcccggcgcgtggcattttatctgcagggccgtccgtcatacgagccggtagacgccgcagcgctgctggacgtcctggcgcgctacggctatcaggtgacgccggaaatgacgccagcgcagcagaagcgggtcattatggctttccagatgcacttccgtcccgcgcgctgggacggggttgccgatgcgcaaaccctggcgatagccgaagcgctgctggaaaagtacgggcgtggttaatagtgcagcttgccgtggtccttcaaccacgcggcggtgcggagtatcccttcatccatcgtgatgaccggctgatagcctagctcctgctgggcgcgggagatatcaagagtaaaatcaaagttcagcttagagacgccgtagtgggtaaatgcgggctctttcgctgacttattgccaaagcgctccatgctgcgggcgatgatatccagcatgggatagggaaccgaacggatgcggcacttaatccccagctcgtctatgagtttctgcacaatgctgtgcagggtttgcggttcgccgttagtaatgttgtacgcgcgggccgagggcagaaggtcactctgcggctggctggcgagccacatcgcgtgtaccgcgttttcatagtaggtcatatccaccagcgcgctgccgccgcgcggcaacaggacgctgccgtagtgctgcatcatctgcgccaggcgcgggataaacactttatcatgcgggccaaacaggctttgcgggcgcaggattgtaaaacgggtatttgggttggcctgcgccagcagattgatcacatcttcgcttgccgccttgctgcgggcgaattcgttggcgaaacgctgcgggcggaaatcctccgcaacatcgcgatgatggtgataatcaaaatagagcgacggcgaagagatatgcacgaagttgcgcacgccccaggcaaccgcccactcgccgagacgccgggtcgcgcgcacgttagctaaatcgaaggcctgctgggtgccccacggcgaggtaaagctggaacagtgccacagggtatcgataccggcgagcatcactttggcctgcgaagagaccagctcggttaagtccgcagggacgaactctgcgcccattttgctcagaagcttgcccatcgcttcgttgcgcccggtcgctctgacgctaatgcccttgttacgcagatattctaccgcgttgcggcccaatccgctggtcgcaccggtaaccagtaccttcatatcgatccactgtttaacaaaagaatttcgtgcgcatttttccgtgattctgactacgatgcaatgagaatcatgaaagaattctgcacctatactctatttgatggtgatttgctccgccaggtgggcgatgcgtcgcgccataccgcgaaaaataaacagatgcgccgggatcatcaacagccagtagaaaagccccggcataccgtgcgggtgccaccaggctcgcacgtccagttcgcgatgatcgcctttatcgcgcagggtaaagctcaggcggccaaggccgggcgctttcatgccgaataacagcgtcagctgcttttccggctcgacgataatcaccttccagctgtccaccgcatcgccggtctgcagatattcattttccgggcgaccttttgccagccggtgaccgaccagcagatccatcgccccgcgcgttttccacagagcgttgccgaagaaatagccctctttgccgccaatttggttgactaccttccacagcgcagcaaggctggcggaagtgttaacggtacagcctgcctgtttcggatagtagccgtactcgggccgccagcgggcgaaggcctgcgcatcgtagccccagtcgctggagttcaccagctgctcctcttctttaagcgtaagccgcaccgcttcatcaaacgcgataagcggttgaggaattaaggcccgcagggcccgatcgtcggcaatcagatcgtgctttagcccctggatcagcgctttggccgtggttggcggcactgaggtaatgacgttgagaaaccacaccgaaatccagcgggtcgggaaagggatggggatcagcgggcggcgtttgccgctgaccgccataaagtggatgaactgctgctgatagctcaaaatttccggtccggcggcttcaaacacccgatgctcgcgggccggatggtttagcagctgcagcagatagtagagtaaattttccagcgcaatcggcgtggtgcgcgagcgcacccagcgcggcggcgtcagcaccggcaggttgtagaccatatcgcgcatcacttcgaaggcggcggaaccggcgccgacgataatgccggcgcgaacttccgctaccggaacgcctgattcgcgcagcagatcgccggtgatctggcgggcgcgcagatgatcggattgctcctgcttctccacctgtaaggaactgagaaagatgacttcgttcaccggcgacttgcgcagcgcgtcgcgaacgttgagggcgacccgccgttcgtggcggataaagtccccgccttcgcccatcccgtgcaccagatagtaaacggtatcagcctgcgccagcagggcgggtagcgcgtccggctggtttaaatcgagcgaatagcactcgacgccggggagctgctgttttttaagcctgtcgatgtggcgtgccgccgccagcacggtgaagccctgctcgctgagccttttcaccagatgctggccgatataaccgctggcgccaagcaccagaattcgctgcgacacgccggactccttaacggtttaaaaatgcctgccagtggctaaccacctcggtgagctgctggcggttaacgtcaatatgcgtcaccaggcgcacgatgggcgaggcgttgatcagcacccctcgttcgcgcagatactcgcccagcgcggcggcgcgcgcttcaccgacgcgaacaaacagcatattggtatcatgacgcgtcacctcggcgccggcggcgcgcagctgctccgccatccacgcggcgttgtcgtgatcctcttttaagcgcgcgacgttgttctgcagggcatacaggcccgcggccgccagaataccggcctgacgcatcccgccgccgaccattttccgccagcggatagcgcggtgaatgtactcttcgctccccaccagcagcgagcctaccggcgcgccgagtcctttagacaggcagatggtgaaggagtcgcagtagcgggcgatctcgcgcagcgcgcagccgtattccacgacggcgttaaaaatacgcgccccgtcaacgtgcagccccaggccgcgctggcgcgtaaactcccaggcatctttgagatattcacgcggcagcactttgccgttatgggtgttttccagcgacagcagccgggtaggggcgaaatggatatcgtccggtttgattttggccgcgactttatccagcggcagggaaccgtccgctgcggcatcgattggctgcggctggatgctgccaagcaccgccgcgccgccggcttcgtagagatagttatgcgcgccctggccgacgatatactcttcaccgcgctggcagtggctgagcagggcgaccaggttggcctgggtgccgctaggcaggaagatagcggcctctttgcccgccaggttggcggcaaagcgctggagttcgttaacggtcgggtcatcgccatacacgtcatccccgaccggggcggccatcatggcttccagcatggcgcggcccggacgggtaacggtatcgctgcgtaaatctatcatgtcatatccttatacacttcatccttcgcgctgccccggcgttggctgctccctcaaagcccggtcacagagttatctctgcgcccgggggttttcggccttgccgccttgaggcaacacgaataattttgcgtatgaattgaaaaggatatttttaccttagccagttagttttcgccagttcgataacttcgtcgccgcggccgctgataatcgcgcgcagcatataaaggctgaaacctttggcctgctccagtttaatttgcggcggcatcgccagctcttcactggcgacgaccacatccaccaggaccggaccatcggtagcgaaagcggtttgcagcgcttcatcaacctctgacgcgctttcaacacgtatgcccttaatgccgcacgcttcggcgatgcgggcaaagttggtggcgtgaagttcagtgccgtctgtcagatagcccccggccttcatctccatcgccacgaagcccagtacgctgttattgaagataacgatcttcaccggcagcttcatctgcgccagcgagagaaaatcccccatcagcatgctgaagccgccgtcgccgcacattgccacaacctgacggtcaggggcggtggccttcgcaccgatggcctgcggcatggcgttagccattgacccatggttgaacgatccgagcaggcggcgcttaccgttcatctgcaaatagcgcgcggcccagacggtcggcgtacccacgtcacaggtaaagatggcatcgtcgtcggcatagtggctgatgcgctgcgccagatactgcggatgaattgttttttcgctgggcttcgccaggtcatcaagccccttgcgcgcgtcgcgatagtgttccagcgctttatcgaggaacttacggtcggttttctcctcaagatgcggcatcagcgcgctgagggtcgatttaatatcgccgaccagcgccatatccactttactgtgggcgccaatactgccgggattgatatcaatctgaatgattttcgcgtccgtcgggtagaaggcgcggtaggggaactgggtaccgagcagcaccagggtatcggcgttcatcatggtgtggaagccggaggagaagccaatcagcccggtcatccccacatcataagggttgtcgtattctacgtgctctttgccgcgcagcgcgtgaacgataggcgctttgagcttcgcggcgaagtctaccagctctttatgcgccccggcgcagccgctgccgcacatcagggcgatgttgcttgaatagcgcagcagctgggccagctttttcaactcttcttccgccggcgtcacctgcggcagcggcgcgtggtaccagtggctgctggcgctttccggcgcggctttcagcgcaacgtcgccgggaagcaccactaccgagacgccgcggttaatcaccgctttgcgcatggcgatggccagcacctgcgggatctgttccggggtggagaccagttcacagtagtgactgcattcccggaacagctcctgcggatgcgtttcctgaaaatagccgctgccgatttcgctggaaggaatatgggcggcgatggccagaaccggaacgtgattgcggtggcagtcgaaaaggccgttaatcagatgcaggttgcccggcccgcaggagcctgcgcagaccgccagttcgccggtaagctgcgcttccgccccggcggcgaaggcggccacttcttcatggcgcgtgggcatccagtcgatggtccccatacggttcaggctgtcgcttaagccgttgagcgaatccccggttacgccccaaatacgtttaacgccagcctgttcaagagttttggcaatgtatgccgccacggtctgtttcatggttctccatctcctttttgtgataacgcttacaagcttagatgaaactgccagttacgctcgctttaacctctcattttccgctggtttttttcagtgaaaactccgcataatctgagctcacataaagtggtaaacaggaatcatttcaaatggttaaatcgctgttaaatgctgttaataaactgctatcccatgacgatttcggcaaactcttgttacgacttgccgttggcgggctgatgctgtttcacgggttgcataagctatttgatggcgtagggggaatcagcaatatgctggtagcaaaaggattgccggggtttatcgcttatggggttttagtgggcgaggtggtagcgccttgcctgctgattctgggagtgcttacgcgtccggcggcgctggtgctggcgtttacgatggtcgtggcctggctgatggtcgggacgggcaaaacctttgcgctggatgcggtaggcgcgtgggcgattgagagcctggtctatttctttgttggcgcgctggcgattgccttcctcggggcagggcgctatgccatcggcggcaattcggcctggcggtaaacattgccggacggcgttgcgccatccggcagctgagggttaagccagtaccaaatcaccctgcgggtggcaggagcaggccagcacgtagccttcagcgatttccgcatcggttaacgtcatggtactgctgacggtatattctccggaaaccactttggttttgcagcagccgcagacgcctgcgcgacaggcgacggtaaccggcaccttattgctttccagcgcttcgagcagcgtggtgccgaccggcgcgtagaacgctttcgccggctgcagtttggtgaacttcaggccgctggtagcggcttccgctaccggcgtaaagaactgctctttaaagaaacgcgtcgcgcccagcgctttcacctcctgctcaacccaatccatatacggcgccgggccgcaggtcatcacggtacgagaggtcagatccggtacgcttttcagcagatcggtcgtcagtcggccagaaacaaaaccgtgggtggcattgttttcagcgactaaggtcaccggatattcgcgccattcgtcggcaaaaataacatcttgcggtgaacgaacgttaaagatcacctgcacatcggcctgcgggcggtactttgccaaccagcgacgcattgacatgattggcgtaacgccgcagccagcagccagcatcaggaacttatcttcagccttatcttcacaggtaaattcacccatggcatcggacagccagatatagtcgccgcgcttcacgtcgcgggtcagccactgtgagcctgcgccatcgtcaatccgacggatggtcagcgtgatgtactcgcttactcccggcgtcgatgaaatggtgtaagcacgcagcgtctccgctgaattacgtacgctgaccagtgcatactgcccggcacggtacggataatagtcgtggcacagcaacgaaattgtccatacatccggcgtttcctgatggatgtgatgaacctgcatccgccatgggcactgatgagttggcattgtcattctttactccttacgcgctcagcagctgcttcatgtcttcttcaacggtggtcacggaacgcagaccgaatttctcgttgagaacggccagcaggtccggcgtgaagaagcccggcgccgtcgggccggtgacgatatttttcacgcccagcgacagcagggtcagcagaataacaatcgctttctgttcaaaccaggagagcaccagagacagcggcaggtcgttcacgccacagctcagtttctcagccagggtgaccgccaggatgatggcagagtaagcgtcgttacactgaccggcatcgaccagacgcggcagaccttcgatatcgccgaattcgagtttgttgaaacggtatttaccgcaggccagggtcaggatcaggcagtcgtccggtacgctggtggcgaaatcggtgaagtagttacgttcgccgcgcgccccgtcgcagccgcccaccaggaagatatggcgcagtttttcacggctcaccaggtcgattagcgtatcagccgcgcccagcagggtctgacgaccgaagccaacggtgatcaggtgcgggatctcgctgtacgggaagcccgccatctgctgcgcctgggcgataaccggggcgaaatcttcgccttccagatgattgacgcctggccagccgacgatgctgcgggtccagatacggtcgtcataggcgccgacggttgggtcgatgatgcagttagaggtcatcacaatcgggccagggaagcgggcaaactcaacctgctggttttgccagccgctgccgtagttaccaatcagatgcttgaatttacgcagttccgggtaaccgtgcgctggcagcatttcaccgtgggtgtagacgttaaccccggtaccttcggtttgctccagcaggttgtacagatctttcaggtcatggccggaaatcagaatgcatttgccttcggtcgctttgacgttgacctgagtcggggtggggtgaccatatttggtggtctcgccagcgtccagaatgctcatcactttgaagttcatctggccgatttccatcgagcactccagcagcgcgttcatatcggcaggccaggtaccgagccacgccatgattttatggtactgggcgtagatgttgttgtcgtactgacccagaacgtgcgcgtgctccatataagccgcagcgcctttaaggccgtacaggcacagcaggcgcaggccgagaatgttctcgccgatggccgctttgtctttgttcggggtgaattccgccgcctggcgctgcaggtcgcccagatcgtcgctcgccagctgcagatcggccatcgggttgttaaccgtcgcgtgggcatcaatgttcaggcactgggctttcagcgcttcacgcagggtgatggcctcgcgcgcatagccaacgatacgcggggaatcgaagttaacgttggtcagcgtggagaaaaaagcgcgcggcgtaaagctgtcgatgtcgtggtcgatgatgccgtattcacgggctttaagcgcccaggcggagagcccctgcagagaggcaatcagcagatcctgcagatcggacgtttcggccgtttttccgcacataccctgcgcgtaagagcagccgttccctgccggggtacggatggtttgttcacattgcacacaaaacatggtcacacctttttaaagttatatttaatatacatgtttaaggttatgcccgagcgcgagaagagaaaaggtatttctgatacaacttacggggagattgatttagcgcaaaattggcggcagaagactaccgccagagaggtattaagcggagaagaaagccatcaatatgggcaccagcagactgagaatgaagccatgaacgatggccgccggcacaatctccaccccgccagagcgttgcagtaccggcagcgtaaagtccattgatgtcgcgccgcaaaggcccagcgcggtggaacggctgcggcgcaccagtccggggataagcattatcgccagcagctcgcgggcaagatcgttaaagaaggccgcgctgccaattaccgggccataggattcggtcagcagaatcccggagagcgaataccagccaaacccggaagccatggccagcccggtttttagcggcaggtcgagaataaaggcgttgatgataccgcccagcagtgaactgaccatgaccactaccgcgacaatcattccgcggcgattcagtacgatctgccgcagcgtcatgccattattgcgcagttgaataccgatgaggaacaaaaggaagatcagggtatattcgctggcctcggtggcgtgttgtaaaaaggatataccgctcagaccaatcataaaaccaataaataccacgccgcatagctgaagggattccagagccattgccagacgggagggtaatttttcctgacgatgatgatttttccagggcattttttgctcgagccacatcagggcggcaatattgcatagcagaataataacgacgctgaccgccgcataatgaaggatcgccaggaggttgctggccagattatccaggaaggccaggctaatgcccataaaaaagagaataacgtagacaatccagctcagaagtcgcgcgatgagtttaagggctgatggccgatgaagaggaataagatagcctataaccaacggcagcagaatgattaaaagtcccgaaaacatgaacgacctggtccttgcagaatgaaaacagcgcccctgacactacccaaatcgccggactgagtaaagtggtggaaaaaaagaaaggcccggcagcaccgggcctcaagaaaagtggaggaagtttagctgcgtttttccagcagggtgcggtagagcacgccgccgagaatgccgccgataatcggcatcacccagaatagccacagctgctgcagcgcccagccgccctggaatatcgctaccgcggtactgcgcgccgggtttaccgacgtgttggtgaccggaatgctgatcaggtggataagcgttagcgccaggccaatagcgacaggagcgaagccggccggtgcgtttttatccgtggcgccgtgaatgaccagcaggaagccgcaggtcaggacgatctcaatcacaatagcggagagcatggagaaaccgccgggagaatgttcgccatagccgttcgatgcgaatccgctagcggcggcgtcaaagcccgctttaccgctggcgacaacgtacagaatagcggcggcgataataccgccgacaacctgggcgataatataaccaatcacgtccctggccgggaaacgaccgccggcccataaacctaaagttaccgccgggttaaagtgcccgccggaaatatgaccgacggcatacgccatggttaatacggttaaaccgaaagccagcgcgacgccggcaaaaccaattcccagctcagggaatgccgcagccagaacggcgctgccgcaaccaccaaataccagccagaatgtaccaaagcattctgctgctaattttctaaacataaccacctcaataaaaacgtaaacgcgcacgagttttcgtgccggcctttattttcgccacaaagaatgacgaccagaataaagcgacgctattctatggacgatcgccaccttgggaccagttaaataaattgatgtaatttgatttagaacaatgcgcggggattccttttcatgtcggtttttttaaaagtgtagaacaaaaacggttaaaaaaacgactttcaatgatgaaggcgtttctcaattaagtgatgtacggctcatcacattcccccctgcggccatgagcgattcgcagacgcccggagtgtcatgttgatgctcacctcgctatactgctgataactgaaggagatagtcgccactgagcggagggcatatgcatcttgagcgtgtagaaatagtcggttttcgcggcattaaccgattatcgttgatgctggaacaaaataacgtgctgattggcgaaaatgcctggggtaaatccagcctgctggatgccctgacgctgctcctgtcgccggagttcgacctctatcattttgttcgggaagatttttggtttccgcccggcgatattcaggggcgcgagcatcatctgcatatcatcctgaccttccgtgaaaatgaacccgggcgccatcgggttcgacgctatcgtcctctcagcagctgctgggttccctgcgacgatggctatcagcgcgttttctatcgcctggagggggagcttgccgatgacgacagcgtgatgaccctgcgcagctttattgatggtgaagggaaagcgctggagcttgacgatattgatgaactcgcccgtcacctggtacggctgatgccggttctgcggctacgcgacgcccgctttatgcggcggatccacaacggcaccgttccgcactcgccgcagatcgaaattaccgctcgccagcttgatttcctctctcgcgaactggtacatcatccgcaaaatttaaccgatggacagatccgccaggggctgtcggctatggtgcaattgctggagcactattttgccgagcagagcagcgcgcagtcgcgccatcgtctgatgcgccgtcattcacatgatgaacagcgcagctggcgttacctggatattatcaacaggatgatcgacaagcccggcgggcgcagccatcgggtgattttattggggctgttttcgactctgctgcaggcgaaaggcacggtaagactcgatcgcgatgcgcggccgctcttgttgattgaggacccggaaacccggctgcatcctattatgctgtcggtggcctggcatttgctcaatttactgccgctgcagcgggtgacgacaacgaactccggcgaactgctgtcattaacgcccgtcgagcacgtctgtcggctggtgcgtgaatcttcacgggtgtcggcctggcggctggggcccggcgggatgaatgcggaagacagccggcgcatcgcgtttcatattcgctttaaccgcgcttcatcgctgtttgcccgctgctggctgctggtggagggggagacggaaacctgggttatcaacgagctggcccgccagtgcggccatcactttgatgcggaaggggtgaaggtcattgagtttgcccagtcgggtttgaagccgctgattaaattcgcccggcgaatgggtattgagtggcatgtgctggtggatggcgatgaagccgggaagaaatacgccgccaccgttcgcagtttgttgaatgacgataaaatgctggagcgagaccatctcaccgcgctaccggcgatggatatggagcattttatgtaccgtcagggcttcgacgatgtttatcaccgggtcgcgcagctgccgatgaatatacccatgaatatgcggcgggtgatcaccaaagcgattcaccgttcgtcaaaaccggacctggcgattgaagtggcgatggaggccggacggcgcggggttgacgccattcctgcgctgttgaaaaaaatgttctctcgcgtactatggctggcgcgcggacgcgcagattagcgcagaccgctgtttctctctttctgccgggcgatccatcccggcaggtcttcatctgcacaccctcaacttcagttaaacaaaaatgaagcgcatctaaaaatgcgcgttattctattgccgcatttagatagaattgtcgcgggttctgcgggttaaaacatcaggaattgttatgaaattaaatggaaagcgcaggaaagtttggtggctgctggcgattgtcgtgctggccctcgccgtctggggatggcgaattctgaatgcgccgctgccgcagtatcagacgctggtggtgcgtaaaggcgaccttcaacagagcgtgctggcgaccggtaagctcgatgcgttgaaaaaagtggacgtcggggcgcaggtgagcgggcagctaaaaacgctgcgcgtcgagattggcgacaaagtgaaaaaagaccagctgctgggggttatcgacccggagcaggcggaaaaccagataaaggaagtcgaagcgacgttgatggagctacgggcgcagctgaaccaggcgcgcgcggaacgtaaactgtctgcggcgacgctggctcgtcagcagcagctggcgcagcggcagctggtctctcgccaggacctcgataccgccgcgaccgacttagcagtcaaagaggcgcaaatcggcacgattgaagcccaggtcaaacgcaatcaggcgaccctggatacggccaaaaccaacctcgactacaccaaaattctggcgccgatgtccggagaagtgacgcaaatcaccaccctgcaggggcagacggtgattgctgcccagcaggcgccgaatattttgaccctggccgatctcagcaccatgctggtgaaggcgcaggtctcggaagcggacgtcattcatcttaagccggggcaaaaggcctggtttaccgtactgggcgatccgctgacgcgctatgaaggaacgctgaaggatattctcccgacgcccgaaaaggtcaatgacgctattttctactacgcccgttttgaagtgccgaacccgcagggcatcctgcgcctggagatgaccgcccaggtgcatattcagctctcagaagtgaaaaatgttatcaccatcccgctgagcgcgctgggtgaggccatcggcgataaccgctatcacgtgcgtctgctgcgtaccggtgaagttaaagagcgtgaaatcgttatcggcgcgcgtaacgacaccgatgtggcggtggtgaaagggctggacgagggggatgaagtcattatcggcgaaggtgcggccggagcggcgaaatgacggcgttactggaactgcgtgatattcgccgcagctacccctccggcgatggcaacgttgaggtgctgaaaggcattacgttgaacattgccgccggtgagatggtggcaatcgtcggcgcgtccggctccgggaaatccacgttgatgaatattctcggctgtctggacaaaccgaccggcggtacctaccgggtcgcgggaacggacgtggctcgcctcaacggcgacgagctggcgcgcctgcggcgggaacatttcggttttattttccagcgctatcacctgttatcgcatctcaccgcggcgcagaacgtggaagtccctgcggtttatgccggcgccgagcgcaaagcgcgcctggcccgggcccatgagctgctggttcggctggggctgggcgacagagctgaatatcagccttcgcagctctccggcggccagcagcagcgggtgagtatcgcccgcgcgctgatgaacggcggggaagtgattctggcggatgagccaaccggtgcgctggacagccgctccggcgaagaggtcatggggatacttcaccagctaaaagcgcaggggcatacggtgattatcgtcacccatgatccgcaggtggcggcccaggcggagcgggtgattgagatacacgacggtgaaatcgtgcgtaatccgcccgctctgagtccggcgcaaggcggcgtactgcgccagcgcacggcggccgaaccgtcggcgtggcgtcagttcagcagcggctttcgcgaagcgctgatcatggcctggcgcgcgatggcggcgaataaaatgcgtacgctgctgacgatgctcgggattattatcggcatcgcatctgtggtgtcgattgtggtggtgggcgatgccgcgaagcagatggtgctggccgatatccgcgccatcggcaccaataccattgatgtatatcccggcaaggatttcggcgatgacgatccccgctatcagcaatcgctcaagtacgatgacctgttagctattcagaaacagccgtgggtgagctcggcgaccccggcggtatcaaaaagcctgcgcctgcgggcggataacatcgacgttgccgccagcgccgagggcgtgggggcgcagtactttaacgtctacggcatgacctttagcgaaggcaatacctttaacgagcttcagctaaatagccgcgcgcaggtggtggtgctcgacagcaacgcgcgccgacagctatttccgcacaaagcgcgggtcgtcggcgaagtgattctggtcggcaatatgcccgcgacggtgatcggcgtggcggatgaaaaacagacaatgttcggcagcagcaaaattctgcgcgtctggttgccctataccacgatggctggccgggtgatggggcaatcgtggctgaattccatcaccgtgcgcgtcaatgaaggctacgacagcgcggttgccgagcagcagctgttgcgtctactggaactgcgtcacggtaagaaagatgttttcacctggaatatggacagcatcttgaaaacggcagaacggaccacacatacattacagctgtttctgacgctggtggcggtgattgcgctggtggtcggcggtattggcgtgatgaatattatgctggtctcagtcaccgaacgcacgcgggagatcggtatccgtatggcggtcggggcgcgggccagcgatgtcttacagcagtttttgatcgaggcggtgctggtttgcctggttggcggggcgctgggcgtcacgctttcgctgctgattgcctttgtgttacagctgtttttacccggctgggagatcggtttttcaccgttggcgctattgaccgcgtttttatgctccacgctgaccggggtgctgtttggctggctaccggcgcgcaatgcggctcgtctggaccccgtcgacgccctggcgcgcgagtagcgataaaaaaatgccagtcagaaggactggcattttgctggcgggatgtacacaatgaagcaaaagagttatgcggctgtttctgtttcttcagcttcaacagggacaatcacgctggcgtggttaccttttggcccctggtgaacatcaaaccgaaccgcttgtccggcttttagcgttctgtaaccatccatctggatggtcgagtaatgggcgaaaatgtcttcgccgccgccctcagggcagataaaaccgaaccctttggcattgttgaaccacttaacagtacccatttccatacttcgacatccttcgtaaatcttataagtaagatggaatgaaccggtagtggagtgacgagttgttcatttgctcgccaactctcgccactacaatttagagaaatcaggaaatgcgtcaagcgattgacgccaggggacggtgaaaaatgcgtcaaaatttgaagcagttaacgctattgccggggaatgtgacagacgtcgcggatggaagtaatagatgataattatctatgatctattgtagatttgtgatgtgcatagcctctggtcatcgacaggccaccgcctgttggcaacagcaaccgatgatgaacactgacgatgagtaagagagactggttggacttcgatcagctaattgaggacgaagttaaagatgcgcttaaaccgccatctatgtataaagtgatattagtcaatgatgactacactccaatggagtttgttattgacgtgttacaaaaattcttttcttatgatgttgaacgtgcaacgcaactgatgctgacggttcactatcaaggtaaagcgatttgcggggtgtttaccgcagaagtcgcagaaaccaaagtatcgatggtgaaccagtatgcgagggagaacgaacatccgttgttgtgtacgctagaaaaagcctgaatgcaggcaataaacttgggggaggtgcctatgctcaatcaagaactggaactcagtttaaacatggctttcgccagagcgcgcgagcaccgtcatgagttcatgaccgtcgagcacttgttgctggcgctgcttagcaacccttcggcccgcgaagcgcttgaagcgtgttcagtggacctggtcgcgctgcgtcaggagcttgaagccttcatcgaacagaccacacccgtactgcctgcaacggaagaagagcgcgacactcagccgacgctgagcttccagcgcgtgctgcaacgtgctgttttccacgtccagtcttccggccgcagcgaagtgaccggcgccaacgttctggtcgcgatttttagcgaacaggaatctcaggcggcatacctgctgcgtaaacatgaagtcagccgacttgatgtggtgaatttcatctctcacggtacgcgtaaagacgagccgagccagtcttccgataacagcggaagtcagcctggcagcagcgaagagcaagcaggcggggaggatcgtatggaaaacttcaccaccaacctcaaccagcttgcccgcgtaggcggtatcgatccgctgatcggccgcgagaaagagctggaacgtgctattcaggttctgtgccgccgccgcaagaacaacccgctgctggtgggggaatccggcgttggtaaaaccgctatcgctgaaggtcttgcctggcgtatcgtgcagggcgacgtgccggaagtgatggccgattgcactatctattcactggatattggctcgctgctggcaggtaccaaataccgcggcgactttgaaaaacgctttaaagcgctgcttaagcagctggagcaggacaccaacagtattctgttcatcgatgagatccacaccattatcggtgcgggggcggcttccggcgggcaggtcgatgccgctaacctgattaaaccgctgctttccagcggtaagattcgggtcattggctcgacgacctatcaggagttcagcaacatctttgaaaaagatcgtgccctggcgcggcgtttccagaaaattgatatcaccgaaccttccgtggaagagacggtgcagattattaacggcctgaagccgaagtatgaagcgcaccacgacgtccgttacaccgcgaaagcggtacgtgcggcggtagagctggcggtgaaatacattaacgatcgtcatctgccggataaggcgattgacgtgattgatgaagccggggcgcgtgcgcgcttgatgccggtgagcaaacgtaagaaaacggttaacgtggcggatattgagtccgtggtggcgcggattgcgcgtatacctgagaagagcgtttcccgcagcgatcgcgatacgctgaaaaacctcggcgatcgcctgaaaatgctggtcttcggccaggataaggcgattgaggccttaaccgaagcgatcaagatggcgcgcgccgggcttggccatgagcacaaacccgtcggctctttcctgtttgccgggcctaccggggtcggtaaaaccgaggttaccgtacagctggcgaagtcgctgggcattgagctgctgcgttttgatatgtccgaatatatggaacgtcataccgtcagccgcttaatcggtgcgcctccgggctacgtcggtttcgatcagggcgggctgctgaccgatgcggttattaagcatccgcacgcggtgctgctgctggatgaaattgaaaaagcgcatccggacgtctttaacctgctgctgcaggtgatggataacgggacgctgaccgacaacaacggccgcaaagcggatttccgcaacgtggtgctggtgatgaccaccaacgccggggtgcgtgaaaccgagcgtaaatccattggcctcatccatcaggacaacagtccggatgcgatggatgagatcaaaaagatctttacgccggagttccgtaaccgtctcgacaacattatctggttcgatcatctgtctacgacggttatccatcaggtggtggataaatttatcgtcgagctgcaggttcagctggatcagaaaggcgtctctttggaagtcagccaggaagcccgcgattggctggccgagaaaggctacgaccgggccatgggcgcgcgtccaatggcgcgggtgattcaggacaacctgaaaaaaccgctggccaatgagctgctgtttggctcactggttgacggcggacaggtgaccgttgaactggataaagagaaaaatgcgctgacctacgacttccagagtgcgcagaagcacaaaccggaagctgcgcattaagtttcggtactcagtgacaaaaccggcctcagggccggtttttttatgcctatgtcctggacccttttttattccactttttaacttgttgattttaataaagagaaaatatagcgtaaaattatggtggcagagaggatgtgttgattaatttcaatgataacaatatggtagggtgttgttcgttcagttcactgccgtacaggcagcttagaaatataactcggccacaggtcggcttatcctgaagttcactgccgtacaggcagcttagaaaatcaggcaaaacatttcctgcatgttcgcgatgttcactgccgtacaggcagcttagaaatgatccgcagattgtaccggcgtcgaccacaggttcactgccgtacaggcagcttagaaaagaccgattttatcagccagggggatgatcacgttcactgccgtacaggcagcttagaaaatgtactgtgccagcagctgaatgcggaaggggttcactgccgtacaggcagcttagaaagcagtgtcgcgttccagaaacagcctgattttgttcactgccgtacaggcagcttagaaaaatataaattgcctgaatttcttgcgcgtactgttcactgccgtacaggcagctcagaaaatttgccgaaaatgctgccgcagttgtatttggttcactgccgtacaggcagcttagaaaagtatcctaaagaaccgttgcggcggcggttggttcactgccgtacaggcagcttagaaatctacgtacagcagagtaaagcatgaagtcagagttcactgccgtacaggcagcttagaaattcctggtttcaccatctacagctttcacctggttcactgccgtacaggcagcttagaaattcagggatattcgcgatgtccgcctgagcaggttcactgccgtacaggcagcttagaaaacaagttgtaggcggccatcaggtagaattttgttcactgccgtacaggcagcttagaaaacaccaaaatggcttcatggctcattgagtgggttcactgccgtacaggcagcttagaaaatcagagtgccggcagctttatcgccggcacggttcactgccgtacaggcagcttagaaatcagagcggtgatttctgcgaaggttgtagatgttcactgccgtacaggcagcttagaaattacaggtgacatcgcacacccctgatacctcgttcactgccgtacaggcagcttagaaatgtggcagccgaacaaaaacggcgacgggattgttcactgccgtacaggcagcttagaaaagtgcagcaaaccagagaagggcgcgccggctgttcactgccgtacaggcagcttagaaaagaagaaaaggcagacccgatcaacgaagagagttcactgccgtacaggcagcttagaaagtattcggtccagtgcctgatggcgcggatgcgttcactgccgtacaggcagcttagaaacgccgcgaaactgggccacgccttcagctgctgttcactgccgtacaggcagcttagaaaaccaacaaactgcaggcagagcagaaagccgcgttcactgccgtgcaggcagcttagaaaatacgccgtgatgaactgaacggaatcccgatgttcactgccgtgcaggcagcttagaaaaaacttcgcgcggatttcagcgattttgtttagttcactgccgtgcaggcagcttagaaacgctactccgcaaaaatgaaattcgtgtgctggttcactgccgtacaggcagcttagaaaatgttgcggagaatccacagcctgttctcagtgttcactgccgtacaggcagcttagaaatgcacgaaatcaacgttgcccgctcggttgccgttcactgccgtacaggcagcttagaaaagagcttgcccacactgctgtgcaagccaaacgagtctaaagaaattgccaaagtaataggttattttgcaagttgcgatgaatgtcaccgtattgcatctaatatactgtttttataaacagctatcgactttgagccacaggatgtgactatgcccgcgaagtatattgccccctcggatttaaaaacgatactccattcaaaacgcgccaacatttactatctggaaaagtgtcgtgtgcaggttaatggggggagagtggagtatgttaccagtgaggggcatgagtcattctactggaatatcccaatagcaaatacaacggccattatgctaggaatgggaacctctgttagccaggcagcgatgcgtgagttcgcccgcgcgggtgtgatggtaggtttttgtggtacggatggcacacctttatatgccgccaatgaagtcgatatcgacgtttcctggctatcgccacaaagtgaatatcgaccaacggagtacttgcagcgttgggtctcattctggtttacggagatgaagcgtctggaagcggcgaaatgcttccagaatattcgactcgcgcaattggaaaaacactggctcggcagccggatgcagcgcgagtcgctattttcagtcaataaagaaaagttgctgggattaacagaacgtgctcgttcaggtatgtccgaggcggatagccataccgcgctgatgcttcaggaagcgcagctcaccaaagcgctgtacaaacttgccgcgcaaacctccggttatggagactttaaacgagcaaagcgtgggggcgggctggatctggcaaaccgcttcctggatcagggaaactatctggcatacgggcttgccgccgtggcggcgtgggtcaccggtatccctcacggcctggccgttatgcatggtaaaacccggcgtggagggctggtttttgaccttgccgatttaataaaagatgcgctggttatgccacaggcatttatctccgccatgcagggggatgatgacagagatttcagacaagcctgtattaatcatttccagcagtcagattccctcgatttaatgattacagcccttcaggaaaccgctgctgtagtggggggaagcgcagaatgaacgtgctgctcgtttcgcaatgcacaaaaaaggccagagaagagagttgccgtattatcgatcagtttgccgagcgtatgggaaccagtacctggcaaactgccataacgatggaagggctggcaacgctgcgcaaattattacgcaaaacagctcgccgcaatacggcggtggcctgccactggctgaaaaaaagcgggcagtccgagctgatgtggatcgtcggaaattcgcgccgttttaatgcccatggcagggtgccgactaaccgcacgacgcggtcggtatgggtttctgacgaaggtttacgttggcaatgcggcgaaagtattgctttgctggctgcaatttccgggctttttcatgatttcggtaaagcgggccgcggctttcaggaaagcctgtccgggaaaagtccaaagacttttcagccttaccggcatgaatggatttcggttcgcctgtttcaggcttttgtcggcgatcaaaatgacgatgagtggttggctatgctcggggcgctttcgcccggtgatgaagcagaactcctcaccaggttgcataaagataacccactgttttccaatagtccttttctcacgcttcccccgcttgccagggctgttgcctggcttatcctgtcgcatcatcggctgcctgataatttagatggcgataatgaaccggtgctgaaacattgtgagggctggttagaaaatcagctcaacgccagctggaattcactgaatcacaaaaatgaaagctggagggaggcggattttcataaggtctggacgttccccctgggaacgccattgcaaagtgttacctggcgagaaaaggggcggcagatagcccggcgcgccagaaatagcgcggcattaaaacagtggggccgaatggaccagccattcatgctgcatatggcgcgtttcagcctgatgctggccgaccatttctattccgccagcgaaccgcagcctgaatggcaggatccgaaatatcgtctgtgggccaacagcgatcgtaacagcggtgcactgaaacagcgagttgatgagcatctatgcggtgtggcccatcacgcgttgcttctgggtcgacagctgatgcgcgttcgttcatcgcttccggcaattgcgcgacataaaggatttcgcgagcgggcggtaaacccgctatttcactggcagaataaagcgtgggacgttgctgttgccctgcgtgaacgaagccgggaagagggtttttttggtgtaaatatggcttctaccggctgcggtaaaacctttgccaatgcgcgaatcatgtacgcacttgctgatgaacaggaaggttgtcgctttaccgttgctcttggcttgcggacgttgacattgcaaacgggggacgcgttgcgaagccgtctgaagctggatgatgacgacatggctgtattgtttggttctggtgcggtaagacaactgtggcagcagtcgaaaggaaccgatcctgacagggacagcatctcagcggagagtttatctgatgaactgcactatgttcattatgcaggtagtgtgcaggcagggattctggaaaaatggttaagcgcggatggaaaactctctgctctggttagcgcacccgtactggttgccaccattgaccatcttatccctgctacggagggcgtgcgtggtgggaagcagctgccggccatgctgcggctattaaccagcgatctggtgctggatgagccggatgactttgatatcaacgatcttcatgcagtatgccgcctggtgaactgggccgggatgctgggaagccgcgttctgctctcgtccgcgacgcttccgccggatcttatccaggcgctgtttgcggcctatctggcagggcgaaaaatatggcaggcgtcctgtggtgtcagcggcagacctgtcaatatctgctgcgcctggtttgatgagaaagatacccgcgctgagcagattgctgacggcctctctttccgtcatgcgcacaacctgtttatcgagcggcgagcaaaaatgctggcggagaaacccaggctgcattttggtcgcatcgcttctctatccgcagagcccgcaacggtggaggatatcattagccgggttgcgcaaaccgttcatacgcaaatgctggcgctgcatcaggcgcataaagagtctcacagcagcggtaaaaccgtgtcgctggggctggtgagatttgccaatatcgatccgctggtcgccgttgcgaaaacgctattcgcgataccttctccgcaagacgtctgtattcattattgcgtttaccacagtcgacatccgctgatggttcgttcagccattgaagcgtgcctggacgaagcatttatgcgtcatcagcccgccaggctctggcagcattcggatattgaaaaagcgcttcacggtcgtccggaaaagcatcatcttttcgtagtgctcggtacttccgtcatggaggtcggacgtgactgggatgccagttggggcattattgaacccagctcgatgcgctctatcattcagtttgcaggccgcatccagcgccatcgtcggcagcttcccgagagcgagaatctggcgatccttagccataatattcgggcgttacgaaaacaatccccggtcttctgcaaacccggatttgaagatcgcgccaatcctttacccgatcacaacttgcttaagctactgccgctgcaggattaccagaccatcaatgcgctaccgcggattttgccggctaagggcgacaataagctggctgcgctggagcatatgcggcttcagatggcattactcaacagcaagagcaagcagttgattgctgctgactggtggcggcgctctcttagctggagcggctggatgcagcgcaaaacgccgttccgtcagtcgcagcctgagaaatcctatttcctttatatgaatgatgaagatagcaagccctgttttgctttttataccgaagacggaagcgtcaaaccgtcaggtaattttaagccgcagtcgctggcgtttgctgacggagtcacctgctgggggaccgtggattatcagcacgcgatgttggggcaggcggaagcgctgggaattgaaatcgaccgcgtgggagccgtatttggcgaaattcgagtaccggaaaatagtcaggaggatgcaaccagcgactggagttaccacccacggttgggtgtttacagggagatacattaacaatgtcaggagcagttatgataaccgaagcactggctcactttatcactgactacatcgcttcacggaggcagccaaaattagaagcctttgaaaaagaggcggagaagcggctggcccaaggcgaggatgccggcgctatcgcgcaggagcgccaggatctcgaagtgaagtatcagccatgcaactggctgacggatgcagcaaggcgagcggggcaaatcagccttgtcactcatgcggcgaagtttactcacggtgactcaaaaagcagcagcatttaccgcgaaacggcgggcgatgagggctatttaagtacagcagtgctggctaacgtggcggcggatgcagtgggcaacgcggctgctctggacgtggcaaaacttctgcaaaccgaagtgggcggcgattcgctgctggcctgtctgaaacgcggcgatcgtagcccgctgaaggcctttgccgaaaatggcgcccagctggcgctgtggattgaaggattctctcaggcgttaacgcctgctcaacccgcctcgcataagcttgccaaacagatttactttccagtcgatggcggctatcacctgctatctccgctatttgctacctcgctggcccaggcgatgcatgaaaaaatggtggcagcgcggtttggcgaagaggcaaaagcggtacgtgaggcccaccggacgggcaaatggcatgcgcagcccgatgtgcgctatccgaatgttgccgaaatgcattttggcggcactaaaccacagaatatttcggcgttaaacagctcgcgcggtgggcgtatctggctcctgccgtcgcagccgccaaaatggacaatgctggataaggcgccgcaaaatctggctagtctctttgcgctgcgtggagagtttaaccgagcggcaaccggcactgtttcccggatggtttctctgcttaaagagaagactgataaaaataaccgccatattcgcagagtgcgggcgggatatgtcgatgaactgattgatttgctgtttcttcaggcagcgacgtaccagcaggaagcgtggcagggatggacgcttaacagcccggatttgcctctccatcagcagctttggctcgacccctggcgtagcaaaacagacgagacatttcgctctgagcgtgaaaaaggtgcctggcagcgcaatatcgccgatgacttctcacgctggctgaactatcgcctgaacaaggcgcgccttgatgtgggtatctcggaacgacgtgagtggcgcactcagcgtctgtttagtcaacggatgcgagaaatggatgccattgtgcgggaggcgctgaaatgagctatctgcttttattgccctatattcgcatcgaaaatgcgaacgcggtggccgggttaacctggggattccccgctattacccattttttagggtatgttcacgcgctttcccgccgggtgagtgactctggcatctctttcaccggctgcgcggtgattagccatgagcatcatattcaggcctattcctccggtcgcgactatcaatttgcgctgacccgcaatccgctgacgaaagaggggaaaacggctccctttaacgaagaggggcgaatgcatctcaccgtctctttgcttgttgaatgccagggcgaaatcatcaacggcgaatatggcaaagcggcgctctgttcgtctctgcttacgctctgccagagccacaaactggcaggcgggagtatcgtgagtatgggcgagccacagatatttaacgcgcctgatgatgaaagaaagctgcgtcagctcctctggcgtctgatgccgggctttgcactctgcgatcgcagcgagtggctgatggagcattatcgccagctgcagcagctgagtccggaaagcagtttactggatgcctggctggactttgcggcgatcaaatatcaggccgttcagcagggaccggaggatagcgtgagctgggagtatcagtcgaaaccgaagccgggctatctggtaccgctgatgtgcggatatcaacgtatttcccggctatacgagccgggggaagtggctaacgttcgcgatagcacaacgccgttcgcctttaccgaggccgtttatggcgttggcgaatggcgagggttacatcgtatagctgaccttcagccgcttatctggcgctaccgcacgagcgatacaggctactactgctctgcaatgtctgttgctgatgatgatttaacatttaacgaagatgacgatttagaataaggacataacgatggcaaaggctcctgtctctataaaaacggcttccgtactggcatttgaacgcaagctcgccacctctgatgcgatgatgtatgcgggaaactggctgggcgataactggcaaccgatcgaaattcaggaaaaagcggttcgtggaaccatctcgaaccgcctcaaaaacgcaatcgccagtgattcgacaaaactggatgccgagatccaaaaagcgaatctgcaacgggtggacacggcggcattacccgctgatgccgacaccttaaaagtgctatttaccctgcgcgtactagggaacttagcgacgccatcggtctgcaatgatatggcctatcagaatgcgattcagcagacgatcgagggctatatcagcgagcacggtttcgcggaactggctcgtcgctatgcggctaacctcgcaaatggacgattcctgtggcgcaaccgcatcggtgctgagcaggttcaggttagcgtgagcgcacaagagcagacgtgggtatttaatagtcacaattattcattacgtgaattttctcaggacgatgacgcaatagcctctcttgcggcgctgctcgaacaagggctgagtggtcagacgtgggtgatgctaacggttgaggcgcaggtgcgcctgggggccgggcaggaggtattcccgtcgcaagagctggtgctggatagcaacagtagtaaaagtcgcgtgctgtatcaggtcgcgggcattgccgggattcactcgcagaaaatcggcaatgcgctacgcaccatcgatacctggcaccccaaagtcgaagagctgggggcaattgcggtagaaccgtacggctcggtaaccagccgtgggatggcctgccgtcagccgaaggacaagatggatttttataccctgctggataactgggtgacgaaaggcgttaagcctgacgttgaacagcagcattatgtgatggcagtacttatccggggtggtgtatttggtgagaaaagcgaataaggggctgtcatggactatttcctggatatccgcgtgctgcccgatccggagtttggcgaagagatgcttatggccgcgttatttgcgaagctgcaccgcgctttaggggccagaagtaaaggggatattggggtaagcttccctgagttttcaatcaaaccgggaccactattacgtttacatggcgacgaatctgcactgtgcgctctggaaaaaacgctctggcgtaaaggtcttaatgattattgtcagagtgggacggtaatgcaggtaccggaaatcaaaggatggcgttgcgtcagccgggtgcaggtgaaaagcagccccgagcggctgatgcgccgttcggtgaaaaaaggctggataacgcaggatgaagcagatgcgcgattgcttaccatgcggggcgagtcgacaacactcccctggctgaatatgaaaagcctttcaaatggacagatatttccgctatttatttgtcacggcgagttgcgggcgcagcgcgtcgcgggaacattcagtagctatgggctgagccatatcgcgactgtcccttggttttagcatttcggtgagaactttcttgttgaatgttaaaacgaaccagtaccggcgctgtattttgcgccggttattcgatcgctacagaaaccctttcttatgatgaggctatcttgttgattttacaagctagttatataaggggcggaaaagggtgttgatgagagtgaggttttttttgattttaaatcaatcttttacgttgttttggtttcagttcactgccgtgcaggcagcttagaaactggacagccaatgcgacaggttatggctctacttcactgccgtacaggcagcttatggtggattaagcatatggttatagaaagataattcgaagcttgctctcacagagagctacggtcatgaatagcgtgagtttataactaaataatggtatcaggcaggaatataaaatgaaaagaccgggaattatcccggccttcagcatctggcgcgctaagcgcgaaaacgatcagcgactacggaagacaatgcggcctttgctcaggtcgtacggggtcagctcaacagtcactttgtcgcccgtcagaatgcggatgtagtttttacgcattttaccggaaatatgcgcagttaccacgtgaccgttttccagttctacgcggaacatagtgttaggcagcgtatcaagtacggtgccctgcatttcaatattgtcttctttggccatctagtcctctggggtatcactaccgtagttttgaaccggcaagataatgccgaagttcagcaagtatgtaaagttttacgtcaaatcgccgaagtagttttggcgcattacccgtaattcacgcggataaaccgggtgacaggcgcaaacgtaaagggggagtgacagaacaatgggtgttatctgactcttattattcccaaacggcggcggggcaacgggcagaagctactctaccgcgcaattataacatcccaacaaaaaatgtgctgaaaacatttatgcttctcctgcaaatagcacccttggtacccagaatcgctccggcagacgatacgtccgcagcacggaaagatagtcgaggtaatcgcggcggggaatttccactgcgcccagcgacgccgtatgcttattcagcacctgacaatcgattaattttccgccatcctgcgaaaatatctggctaaagaccagcagcgcggttttagaggcgttttcggcacggctgaacatcgactctccgcaaaacagcgcgccctgcgcgacgccgtacatcccgccgactaattcctttccctgccatacttcaacagaatgagcatgtcccagctcatgcagctggtggtatgcctgaacgatccccggcgttatccatgttccctcatcgcgatggtcggcgcagccctcgataacctgaccaaaggcatgattcagcgtgacgcgataaggcgagcgctgatggaaacgcttcatactgcggctgagatgaaatttctctggccacagcactgctcgcggatcgggggaccaccacaaaatagggtcgccgggcgaaaaccacggaaaaataccgcgctgataggccatcagtaaacgcgccgggctaagatcgccgcccagcgctagcaggccattaggttcgcgtaaagcgccttccggggaggggaaggcgatggaatgatgagagagctgaaccagccgcatttttacctcaacgcatcaggcaatgattcaatagtagcctacaggcgctgcttaaactggtagtaacgcccctgttcagccagcagttctgcgtgactaccttgctcaataatcttcccgttgtccatgactattatctgattaaaacgcgccagtccgcgcagacgatgggttaccattaacacggttttttcacgcatcacttccgccagtaaatcaaggatttgactttcggtcgtcgcatcgaggccttcagtgggctcatcaagcagcatgagaggcgcatcgtgaagcagggcgcgggcgatagccagcctgcgcagctcgccgccggaaagctgacgaccgccttcacccagccagctgttcagaccgctatcttccagtaatttcgctaagccgacgcgttcaagcgtttgggcaagccgggcatcgctggctccgggagaagccagcagcaggttgtcgcgcagcgtagcgctgaacagatgcacgcgctgcggcacgacgctcatcgcccggcgcagcgtcgcctcattaaactgccccagcggctgattgttgagtaatatttccccttcagccggatcccaggcacgggtcagcagctgcaacagggtcgatttaccgcagcctgttcgtccgaggatggcgatatgctctccggcctcgatctgcaatgacactttctccagcgcgggggagggctgctgcggatagctgaaggtgacctgatgtaagcgtaacgagacgcgatccagcgtctggccttcgccctgagggaaggccacttccggctcttgctcggtaatttgcgtgatgcgctttgcggaggcgatcacctgccctaaatgctgaaatgcgccggttaccggcgccagcgcttcaaacgccgccagcgcgcagaagacaaacagcgcaatcagcgcccctggctgagtatcgccgccaacgcccgcggaggcgagccacagcatagcgataaccgcaattccgccaatcagcagcatcagcgcctgagagagcgcggtgagctcagcctggcgacgctgcgcatccagccagcgcgcttccgttttttccatttgctgccggtagcggtcgctggcgttgaacagcatgagttccgcctgtccctggagccatgaggtcagatgctggcgatattgcccgcgaagccgggttatgctttcacctgcgggtttacctgcgcgatagaacagcggcggcatcaccagcagggtgagcagcataataccaccgagggtcagggccagagtgacgtccagcacgctcaaccctacggtgacgaccaggatcaccaccagcgcgcctaccagcggtgatatgacgcgcaaatagagatgatccagggtatcgacatctgcaaccacccggttaagcagctcaccctgacgaaaacgcgccagtccggcgggggagagcggcagcagcttactgaaggtaaagacccgcaggtgttgcagaacgcggaaggtggcgtcatggctgaccagacgctcaaagtagcggcccgcggtgcgaataattgccgcgccgcgcacgcccgcggctggcagcatatagttaaagctgtagatgcccgccacgccaacgacggctgatgccgacaggaaccagccggatagcgttaataagccaatgctggccagcagcgtcacgatcgccagcacgataccgagcagcaacagccatttgtgtcgtttgtacagcgccaggtaaggccataatgcgcgcatttaaatctcctcctgacgatgagcgagcagggtcgcgaaggggccgccagcggccgccagctgcgaatagctgccttgctcaacaattcgaccatcctgcataacccagatcgcatcccagttcgccagtccttccagctgatgggtaaccattaacgtggtttgctgcgttgatgcattggtcagcgcctgcatcacgcgctgttcgctatgcgcgtcaaggctggcggcaggctcatcaagcagcagcagacgacagggcaccagcagcgctcgtgcgacggcgacgcgctgagcctgcccgaccgacagccggccggcctgatcgccaacaggcgtattaataccctgcggcagaagagagacgaactcgctaacccaggctttatccagcgcaagctgcagctgcgcttcggtggcttcagggcaggagagcaggacgttttcgcgcagcgtcgccgcgggcagctgtggattttgcccgacccagctcaggagacgacgccagcggtcggcatccagactctttaactcgacgccattgaccttgagcgagccgtcatagggaagaaaacccgttaacgtattcagtagcgagcttttgcccgagccgctttgcccaaccagcaccacgcgttcaccggcgcgcagggaaaaattcagcggcccggccagcactttcccttcgggagacttaatcagcaggtcgcgagcttcaaggcttaccgtttcatcatcttttaatgccttttccccacgctctgcctgcgctagcggcgcttccataaaggtcttcaggctatcggcggcgccaatcgcctgcgctttcgcatgataaaaggtacctaaatcgcgcagtggctggaaaaactcaggagccagaatcagggcgaggaaaccggacatcaacgtcaccccggcgccgtaatggccaaagttgagctctcccagataggaaaaaccaaagtaaacggcgaccagcgcaatcgacagcgaggtgaaaaactccaggacaccggaggagagaaacgccaggcgcagcacttccattgttcgctggcggaaatcctgcgaggcctcgcgtatgttgtccgtctccgcttcgccgcgatgaaaaatacgcagcgtttccataccgcgcaggcgatcgagaaaatggccgcttaaacgcgccagagcgagaaagttgcggcggttggcatcagccgcgcccattcccaccagcgccataaacagcggaataagcggtgcggtacccagcagaatcagcgccgcggcccagttgatggggaaaatcgtaataacaatcagcaacggtacagaggcggccagcgtcatctgcggcaaatagcgagcatagtagtcatgcatatcgtcgatctgctcaaggatcagcgtggcccagctacccgcaggtttgccctgtatccacgccggtcccgcctgctgtaaacgatccagaacctgacggcggatctcaaggcggatatgttgaccggcctgaaaacccactctttcacgcagccagaccacccaggcgcgcagcacaaagaccagcaccagtagcgtaaagggcagcagcagcgccgttgcggggatattttccataatcatgcgatggaggatcctcgccaggaaccaggcctgggcgacgatcaacaggccgctaacgacgcccaatacgcgggaaatcatcaaccagcgacgggagataatgctttgatcttttaaccaacgggttaactcttgttgacgggttttattcattgcgcgcttagcaggtgtagttatgagttttttgggcacggcaatgttacaacgaggcaaaaataaaggcgacttttcgtcgccttctttacctttgttactgacttgtaaagattatttgcaagcgtcggctaaaccatccagatagcgctccgcgtccagcgccgccatgcagccggtacccgcagaagtaatcgcctgacggtagatatgatccatcacgtcgccggcggcgaagacgcccgggatgctggtctgggtagcgttgccgtggatgccggactggactttaatgtagccgttttccagctccagctgaccggcgaaaattgccgtgttcgggctgtggccgatagccacgaacagcccagcaacctcgagggattcaacgttgtccgcattctgggtatcgcgcagacgcaagccgcttacgcccatctggtcgccggtcacttcttccagcgtacggtgggtgtgcagcacgatattgccgctctccactttgtccatcaggcgtttaataaggattttttccgcgcggaagccgtcacgacggtggatcaaatgcacttcggaagcaatgttagacaggtagagcgcttcttcgacggccgtattgccgccgccgatgacggcaaccttttggttacgatagaagaaaccgtcgcaggtcgcgcaggcagacacgccgcggcccttaaacgcttcttccgagggaagacccagatagcgtgctgaagcgccggtggcaataatcagggcatcgcaggtgtattcgccgctgtcgccgaccagacggaacggacggttttgcaggtcaacgctgttgatatgatcgaaaataatttcggtttcaaatttggtggcatgttcatgcatgcgctccatcagcagcggtccggtcagatcgttaggatcgcctggccagttttccacttccgtggtggtggtcagctgaccgcctttttccattccggtaatcagtaccggctgcagatttgcgcgcgctgcgtagaccgcagcggtgtatcccgcaggtccagaaccaaggataagcagtttactgtgtttggccgtgcccatgagatcctcataatttattggcatacatgggctggattgtagggaatttgtggacgtaaaaaaagagcgcggcggttttgttaacgatatgtgcaatagaagctgccgattaatcggcgatttaacgaacgaagaatataactaattctactgttagcgagacaattataagaggaaaacatgagaatcaaccggggaggattatgaatatctggcatcttgtactaaaaatcgatgttttgctttgacaatcccctgtgcttttgcgaaaacattcatggaagaagaaaagcagtgtttcgcgtgtggcgaattttcatgcacgcaaatgccatttttatccgggttagcgaaatctacgcatggtgtggacagacgccatgcgtgatgtcggtgactgccgtcaggcaacgggcttctcacgtacccctgggttacccaacgtcgtacgggtgataacaggatggactctggcagtgaaggctcagagtcggaacaggagtagggaaggaatacagagagacaataataatggtagatagcaagaagcgccctggcaaagatctcgaccgcattgatcgtaatatattgaatgaattgcaaaaagacgggcgtatttccaacgtcgagctttctaaacgggtgggactttctccgacgccttgccttgagcgcgtgcgtcgactggaaagacagggttttattcagggctatacagcgctgctcaacccgcactatctggatgcatcacttctggtatttgttgagattactctgaatcgtggcgcgccggatgtgtttgagcaatttaactccgctgtgcaaaaacttgaagaaattcaagagtgtcatctggtttccggggattttgactacctgttgaaaacccgcgtaccggatatgtcagcgtatcgtaaattactgggcgagaccttgctgcgcctgccgggcgtaaatgacacccgtacctatgtggtaatggaagaagtcaagcagagtaatcgtctggtaatcaagacgcgctaacacggaacaggtgcaaaatcgatgtagtttgattacactcctgttaatccatacagcaacagtgccggggagacccggcactgttgtccgttttagccgaaggcaggaaacagcctgatacctggagagcctttcttgagccaggaatacactgaagacaaagaagtcaaattcacaaagctgagtagcggacgccggctccttgaggcgttactcattctttgctccctttttgccatctggttgatggcggccttactcagctttaatccctcggatcctagctggtcgcaaacggcgtggcatgagcctattcacaacataggtgggacgccgggagcctggcttgccgatacgctatttttatttttggcgtaatggcctataccattccggtcatcattatcggcggctgctggtttgcctggcgtcatcaggaaaacgacgagtacatcgactatttcgccgtctcgctgcgtttaattggcgcgctggcgctgatcctcacttcctgcggtctggcggcaatcaacgctgatgatatctggtatttcgcctccggcggcgtgatcggcagcctgctgagcaccaccctgcaaccgctgctgcacagcagcggcggcacaatcgcgctgctctgcatctgggcggcaggactgacgctatttaccggctggtcctgggttagcattgctgaaaaactcggcggtgcgattctttctattctcacgtttgccagcaaccgtactcgtcgtgacgatacctgggttgatgaaggggaatatgaagatgatgaagaagaatatgaagatgatgaacccgcgaagccgcagggttctcgacgggcgcgaattttacgcagcgccttagctcgccgccagcgtctggctgagaagttctctaatccgatgggacgtaagaccgatgcggcgctgttctcgggtaaacggatggatgacgccgaagacgaggttcagtacagcgccggcggtgcgcctgttgccgctgacgatgtccttttttctggctccagcgcagcgcgtccggcaaatgctgatgatgttctgttctccggcgtcagtgcggcacgtcccggcgattttgacccctacgatcctctgttaaacggtcatagcattgccgatccggtagctttggccgcgcaggataccgctgcgccgcaggcatggtctgaaccgctgccagggtatgaggctcagccggtctatcatccggaacaggcaccggtacagcagccagcatatcagccagaaccggcttaccagccgcagcatgcgtaccagccagagcaggcgccggtacagcagtcagcgtatcagccggaaccgacttaccagccgcagcatgcttaccagccggaacaggcgccggtacagcagccagcatatcagccggaaccggcttaccagccgcagcatgcgtatcagccggagcaggccccggtacagcagccagcgtatcagccggaaccggcttacccgccgcagcatgcgtaccagccggaacaggcgccggtacagcagccagcgtatcagccggaaccggcttaccagccgcagcatgcgtaccagccggaaccggcttaccagccgcagcacgcgtaccagccggaacaggccccggtacagcagcctgagccttacgccgcctccgttgagcctgagcctccgcaagaggaggtgaagcctcagcgtccgccgatgtactacttcgaagaagtggaagagaaacgcgcgcgtgaacgcgagcagcttgccgcatggtatcagccgattccggagccggtcagtccggttgcgacaaagccgatctcgcctccgcctgctccggcggctgatgttgccgcggtgagcgcgctggcggctggcgtccatcaggccaccggggcggcctctgctagcgccgcggcggcctccgtcgcatctgccgcatccagcgccgcgccgctatttagcccggcgtcgggcggcccgcgtgcgcaggtaaaagagggtataggcccgaaattgccgcgtccaaaccgcgttcgcgtgcccacgcgccgtgagctggcttcctatggcattaagctgccttcgcagcggttggctgaagaacgtgcgcgtcaggcagagcatcagcactatgatgacgatgcgctgacggacgaggaagttgcagagcttgagcagggtgagctggcgcgtcagttcgcggctgcgcaaaatcagcgctatggcgagagctacgctgcggaagaggctgatgtagacgaggattctgccgctgaagccgaacttgcccgtcagtttgccgcttcccagcagcagcgctacgccagcgagcagccgccgggatcgcatccgttctctgcggcggattatgaattctcgccaatgaaaacgttagttgatgacacaccgagcgagcctgtcttcacgccgttgccggaagtacagcagcctgccccgcagtatcagcagccggcccagcattcgcagcccgtacagcagccgatgccgcaccagcagatgcctcagccgccgcaacatgcgcagcagcaggcttatcaacccgcgcagcagcagccggttcaccatcagccgatgccgcagcaggctcctggcagctatccgcagcagcaggctccgcagcagccgatcccgcagccgcaggaaagtctcattcacccgctgctgatgcgcaatggcgacagtcgcccgttacagaagccgacgacgctgctgccctcgcttgacctgctcacgccgccaccggctgaagttgagccgatcgatacctttgcgcttgagcaaatggcgcgtctggttgaagctcgtctggccgatttccgcattaaagccgatgtggtgaactactcacctggcccggtcattacccgctttgagcttaatctggctccgggcgtgaaagcggcgcgcatttccaacctgtcgcgcgatctggcccgttctctgtccactgcggcggttcgcgtggtggaagtgattccgggtaaaccctacgttggcctggagctgcctaacaaaaagcgccagaccgtttacctgcgcgaagtgctggataatgcgaaattccgcgataatccttcaccgctcacggtggtcctcgggaaagacattgcgggcgaacctgtcaccgccgatctggcgaagatgccgcacctgctggtggcgggtaccaccggttccggtaaatccgttggggtcaacgccatgatcctcagcatgctctataaagcgcagccggaagacgtgaaattcatcatgattgacccgaaaatgctcgagctgtcggtctatgagggaataccgcatctgttaacggaagtcgtgacggatatgaaagacgcggccaatgctttgcgctggagcgttaacgagatggagcgtcggtataaactgatgtctgcgctgggcgtacgtaatctcgcgggttataacgagaagattgctgaagctgcacgtatgggacggcccattccggatccttactggaagcctggcgacagtatggatgcgacgcatccggtactgaaaaaagagccttacatcgtggtgctggtggatgagtttgccgacctgatgatgaccgtcggcaagaaagtggaagagctgattgcgcgcctggcgcagaaagcgcgcgccgcggggatccacctggtgctggcgacccagcgaccgtcggttgacgttatcaccggcctgattaaagccaacatcccgacgcgtatcgcctttaccgtatcgagtaaaattgactcgcgtactatccttgaccagggcggtgcggaatctctgctgggaatgggcgatatgctctactccgcgcctaactcgacgatccctgtgcgcgtccacggcgcttttgtacgcgacgaggaagttcacgccgtcgttcaggactggaaggcgcgcgggcgtccgcagtatgtcgatggcattacctccgatagcgaaagcgaaggcggcggcggtggctacgagggcggtgaagagctcgatccgctgttcgatcaggccgtcaactttgtcacggaaaaacgcaaagcctccatatccggggtacagcgtcagttccgcattggctataaccgcgccgcgcgtatcattgagcaaatggaagctcaggggatcgtgagcgagcaggggcataacggtaaccgtgaagtgctggcgccgccgccttttgagtaaccgcaaagttgggtaaataagtgaaaatcagcctgttctgctgttttacggtcattggccgttctacattagcagcagaccaggctcccgcgtcgggagtgacgcacattaaggaataacaatgaaaaaactcgcaatcacctgtgcattactgtccagttttgtcgtcagtcaggtatgggcggatgccgccagcgatttaaaaagccgccttgataaagtgagcagcttccactccagctttacccagaaggtcaccgacggcagcggtaatgccgtgcaggacgggcagggggacctgtgggtcaagcggcctaatctgttcaactggcatatgacccagccggatgaaagcgtgctggtgtccgacggcaaaacgctgtggttttacaacccgtttgttgagcaggctaccgctacctggctgaaagatgcgaccagcaacacgccgtttatgctgattgcccgcaatcaggccagcgactggcagaactacaacattaagcagaacggtgacgattttgttctgacgccgaaaaacggcagcggtaatctgaagcagttcaccatcaacgtgggtcgcgacggtacgattcatcagttcagcgccgtggaacaggacgatcaacgcagcagctatcagctgaaatcgcaacaaaatggtgccgtggatgcatctaagttcaccttcacgccgccgcaaggggttacggtggacgatcaacgtaaatagaggcgaacgtgagcaacctgtcgctcgatttttccgataacgcgtttcaacctctggccgcacgtatgcggccagaaaatttagcgcagtacattggccagcagcacctgctggcgccgggtaaacccttaccgagggcgattgaggccgggcatctacactcgatgatcctctgggggccgcccgggacaggaaaaaccaccctggccgaagtgattgcgcgctatgccagcgccgacgttgaacgtatctcagcggtgacctccggggtgaaagagatccgcgaggccattgaacgcgcgcgccaaaaccgcaacgcgggtcgccgcacgatcctgtttgtcgacgaagtgcaccgtttcaataaaagccagcaggacgcctttctgccgcatattgaagacgggaccatcacctttatcggcgcgacgacggaaaatccctcctttgaactcaattccgcgctgttatcccgcgcgcgcgtttatctgctcaagtcgctgaccagcgacgacatcgagcaggtgctcaaccaggcgatgagcgacaaaacgcgcggctacggcgggcaaaatatcgtcctgccggacgagacgcgcaaggccatcgccgaccttgtcaacggcgatgcgcgccgggcgctgaatacgctggaaatgatggccgatatggccgaagccgacgcctccggcaatcgcgtgctgaaagttgagctgctgactgaaattgccggtgagcgcagcgcgcgtttcgacaacaaaggcgatcgcttttacgatttaatctccgcgctgcacaaatcggttcgcggcagcgccccggacgccgccctctactggtacgcgcggattattaccgccggcggcgatccgctctacgttgcccgccgctgcctggcgattgcctcggaagatgtcggcaacgccgatccgcgcgcgatgcaggttgcgatctccgcatgggactgctttacccgtgtcggaccggcggaaggcgaacgggcgattgcacaggccattgtttatcttgcctgtgcgcccaaaagcaacgcggtttacaccgcgtttaaagcggcaatggccgacgcccgcgaacgtcccgattacgacgtcccggttcatttgcgcaatgccccaacgaagctgatgaaagagatgggctacgggcaagagtatcgctatgctcacgatgaaccgaatgcttatgccgccggggagcagtacttcccgcaggaaatggcgcaaacgcgctattataagccgacaaaccgggggctggagggcaaaataggcgaaaagctcgcctggttaaccgaacaggatcaaaatagcccgataaaacgctaccgataattgaggcgttgcggtaaggttgtcacactatttccgtggtcgcgctctgcggccatttttcttttattaattcgataagcacaggataagcatgctcgatcccaatctgctgcgtaccgagccagacgcagtcgcagaaaaactggcacgccggggctttaagctggatgtagataaacttcgcgctctggaagagcgtcgtaaagttctgcaggttcaaactgaaaacctgcaggcggagcgcaactcccgatcgaaatccattggccaggcgaaagcgcgcggggaagatattgagccattacgcctggaagtgaacaaactcggcgagcagcttgatgccgctaagaccgagctggacgcgctgctggcggagatccgcgatatcgcgctggctatccctaatatcccgcacgacgacgttccggccggtcgcgacgaaaacgacaacgttgaagtcagccgctggggaaccccgcgtgagttcgattttgacgttcgcgatcacgtcacgctgggcgaaatgcatggagggctggattttgccgccgccgtgaagctgaccggttctcgctttgtggtcatgaagggccagctggcacgcctgcatcgcgcgctggcgcagtttatgctggatctgcataccgaacagcacggctacagcgaaaactacgtcccgtatctggttaaccaggacacgctgtacggtaccggtcagctgccgaaattcgccggcgacctgttccatactcgtccgctggaagaagaagccgacagcagcaactacgcgctgatcccgacggcggaagttccgctgaccaacctggttcgcgatgaaatcattgatgaagacgatctgccgatcaaaatgaccgcgcatacgccgtgcttccgctctgaagccggatcttacggccgcgatacccgcggtctgatccgtatgcaccagttcgacaaagtcgagatggtgcagattgtacgtccggaagattccatggcggcgctggaagagatgaccggccacgccgagaaagtgctgcagctgctgggtctgccgtatcgtaaagtggctctgtgcacgggcgatatgggcttcagcgcatgcaaaacctacgatctggaagtgtgggtgccggcgcagaatacctatcgtgagatctcttcctgctccaacgtctgggatttccaggcgcgtcgcatgcaggcacgctgccgcagcaaatctgacaagaaaactcgcctcgtacacacgctgaacggttctggcctggcggtcggacgtacgctggtcgcggtgatggaaaactatcagcaggcggatggtcgcatcgagatcccggaagttctgcgcccgtatatgcgcggccttgaatttatcggctgatttttcaacgctcttctcaaaagcgcctgcgggcgctttttttttacccccttcttgataccgggcaataatcgccttcgcgattacgaagatactccctttggattaaacaggataaaaaactaataaaggttaatttcgttgtatatataactatataacggcattaagttaattgtgagcaaccaaagcgagtatctatgaaaaccaaaacctccgatgctttactggctgctgaggtgagccggcgtggtttaatgaaaaccacggcgattggcgggctggcgatggccagcagcgcttttaccttacccttcacgcgcattgcccaagccgcagataacctcaatcccgccagcgaaacggtcacctggagcgcctgtacggtgaactgcggcagccgctgcccgctgcggatgcatgtggtgggtggtgagataaaatatgttgaaacggacaataccggcgacgatagctacgacggtctgcatcaggttcgcgcctgtctgcgcggccgctcgatgcgtcgacgcgtctacaacccggaccgcctgaaatatccgatgaagcgcgtgggtaaacgcggcgagggcaaattcgagcaaatcagctgggaagaagcgtttgatactatcgccagcaatatgcagcgcctgataaaagagtacggtaatgagtccatctatctgaactacggaacgggaaccctcggcggaaccttgactcgctcatggccaccggggaaaaccctgattgcccgcctgatgaactgctgcggcggctatctcaaccattatggcgactactccaccgcgcaaattgccgcgggactgaactacacctacggcggctgggccgatggcaatagcccgtcggatatcgaaaacagcaagctggtggtgctgtttggcaataaccccggggaaacccgcatgagcggcggcggagtgacctactacctggaacaggcgcgggagaaatccaacgccaggctgattattatcgatccacgctataccgacaccggcgccggacgcgaagacgagtggatccctatccgcccgggaaccgatgctgcgcttgtctccgcgttggcgtgggtgatgattaacgagaacctcgttgaccagcctttcctcgacaagtactgcgtaggctatgacgagaaaacgctgccggaaggggcgccggccaatggccactataaggcctatattctcggtcagggcaaagacggtatcgcgaagacccctgagtgggcgtcgacgattaccggcattccccaggcgcgtatcgtgcagctggcgcgcgaaatcgccagcgctaaacctgcctatatttctcagggctggggcccacagcgtcatgccaacggtgagctggtttcccgcgcgatttccatgctggcaatcttaaccggcaacgtcgggattaacggcggcaataccggcgcacgtgaaggttcttactccctgccttttgaacgtatgccgacgctggataatccggtggaaaccagtatttccatgtttatgtggaccgatgcgattgatcgcgggacggaaatgaccgcgctgcgcgacggcgtgcgcggcaaagataagctcgacgtgcctattaaaatggtctggaactatgccggtaactgcctggtcaaccagcattcagagattaaccgtacccatgacatccttcaggatgacaagaagtgcgagatgattgtggtcattgattgccatatgacctcctcggcgaaatatgccgatattctgctgccggactgtacggcttcggagcagatggattttgccctcgatgcctcctgcggcaacatgtcatacgtgatttttgccgatcgggccatcaagccgcgctttgaatgcaaaaccatctatgagatgaccacggagctggcgaagcgcatgggcgttgagcaacgtttcaccgaaggccgcactcaggaagagtggctgcgtcacctctatgagcaatcccgtaaagcgatcccggcgctgctgccgtttgatgaattccgcaagcagggaatcttcaaacagcgcgatccggaaggccaccacgttgcctataaagctttccgcgaagatcccgtcgccaatccgctcacgacgccgtcagggaaaattgaaatctactctgcgcagctggcggaaattgccgcgacctgggagctgaaagaagaggatgttatcgatccgctgccgatatacagccctgggtttgaaaactatgacgatccgctggcgaaaaagtatccgctgcagctgaccggttttcactataaagcccgcacgcactccacctacggcaacgttgacgtactgaaagccgcctgccgtcaggagatgtggatcaacccgcttgatgcacagaagcgcggtatcgccaatggcgatcggatccgcatttttaacgatcgcggtgaagtgcatatcgaggccaaagtgaccccgcgcatgataccgggcgtggtcgcgctgggtgagggggcctggtataacccggacgcaggccgcgtggatcaggctggctgcattaacgtgctgaccacccaacgcccgtcgccgctggcgaaaggcaatccatcgcatagcaacctcgtccaggttgaaaagctgtaaggagtaaccgatgacaactcaatatggattttttattgattccgcccgttgcaccggttgcaaaacctgcgaactggcttgtaaagactataaaaacctcacgccggaagtgagcttccgtcgtatctacgaatacgccggcggcgactggcaggaggataacggcgtctggcagcaaaacgtctttgcctattacctctctattgcctgcaaccattgtgaggatccggcctgcaccaaagtttgcccgagcggggcgatgcataaacgtgaagatggctttgtcgttgtcgatgaagatgtctgtatcggctgtcgctattgccatatggcctgcccatacggcgcgccgcagtacaatgcgacaaaaggtcatatgaccaaatgcgacggctgccacgagcgcgtcgccgacggcaaaaagccgatttgcgtggaatcttgcccgctgcgcgcgttagatttcggcccgattgaagagctgcgccaaaaacacggccagctggccgccgttgcgccgctgccttcggcccacttcactaaaccgagtatcgtgattaaacctaacgccaacagccgaccgtgtggagataccaccggctacctggccaacccaaaggaggtgtgagatggggagtggatggcatgaatggccgctgattattttcacggtctttggtcagtgcgtggtgggcggcttcattgtgctggctctggcgctaatgaaaggcgacttatcgcgtgaacagcagcagcgcgtcgtgtggagcatgtttggcctgtgggtgctgatgggcgtgggctttattgcctcaaccctgcatcttgggtcgcctatgcgcgcgtttaactcgctcaatcgcgtaggcgcctcgtcgctcagtaacgaaatcgccagcggggcgcttttcttcgccgtcggcggcattggctggctgctggcggtggtcaataagctaccggcggggctgcgtcatctctggctggtcattaccatggtgctggggattatcttcgtctggatgatggtccgcgtctataacactattgatacggtacccacctggtatacggtctggacgccgcttagcttcttcctgacgatgtttatcggcggtccgctgctgggatatctgctgctgcgcgttgccgatgtcaacggctgggcgatgcgcctgctgccggcggtgaccctgctggcgctggtgattagcgccatcgtggtgctgatgcaaggcagcgagctggcgacaatccatagctctattcagcaggcctcggcgctggtgccggcctacggctcgctgatggcgtggcgcctggttgcgctggcgttggcgctgatctgctggattgctccccagctcaaaggctaccagcctgcgctgccgatgctggggctggcttttgtgctggtgctgatcggcgagacgatcggccgcggcgtcttctacggcctgcatatgaccgttggaatggcaatcgccagctaatcgccctttatcgcgccagaaacccttattctggcgcgataaaaagtgcggtcgattcatgaaatatttctaccgatattcccaccgctattttccaataaattaataaaaacaatggaataatataaataactattctgttgtcgatccgctggataaaaaacttctatcgttcccccgcaaaccgcgtcacgcctgatttcaggcggattgacaatgtttgcagcagtggcatgatgcgcacgaaatctgaactccatcacggtttatatccatgaccatctacacccggccagtgcaaatgctgctctgtggcctgcttttgttgaccctggcgatagctgttttaaatacgctcgtcccgctttggctcgcccatgaaaatatgccgacctggcaggtcgggatggtgggctcgtcctattttaccggtaatctggtgggaacattgcttgccggatgggtaattaagcgtctgggctttaaccgcagctattacctggcatcggttatttttgccgtgggctgcgtgggtcttggtattacgctgggcttctggagctggttcagctggcgctttatcgccggcgtcggctgcgcgatgatttgggtggtggtggagagcgcgctggtctgtagcggcacttcgcggagccggggtcgcctgctggcggcgtatatgatgatttattacgtcggcacggtgctgggccagttaatggtcagcaagctgccgacggatctgatgagcgttctgccgtgggtgacggcgctggcgctggcggccattctgccgctgctgtttgctcgcgtggcgactcaggccgatgagccgcacgaaccggcgcgtatctggccaatgttaaggctgcgtcaggcccgccatggcgtcaacggctgcattatttccggcattgtgctcggttcgctgtatggcctgatgccgctgtggctcaaccaccagggcgttagcgattccggcatcggcttctggatggcggtgatggtgagcgcaggtatcgtggggcagtggccgattggccggctcgccgatcgctacggccgtctgctggtcctgcgcgttcaggtatttgtggtgattctcggctgtctggcgatgttaagccaggccgcaatggcgcccgcgctgttcgtgctgggcgcttccggcttcacgctctatccggtggctatggcctgggcctgcgaaaaagttgagcgtcatcagctggtggcgatgaaccaggcgctgttaatgagctataccgtgggcagcctgcttgggccgacgctgaccgccatgctgatgcagaacttctctgacaatctgttgtttatcatgattgccagcgtgtcattcatctacctgctgacgctgctgcgcaaagcggggcaccatcctacgccggtggcgcacgcctgatttttcagaacatagccagggcatgtccctggctatggattaatgcgacgcaagaagcgcaataaactgtgcccggttttgcaccatgctgtatcgctgaagtctctccccctcatccagccagcagactaaccgctggatggtctggatatgctgttcactatcggccgccgccagtacgactatcagccgaatgccgggatgctccggaaaatcaacggcctcgctacagcaaagcagcgaaagcgcgctgtttctgctcagcacgccggcttccggacgcgcgtgcggtagcgcaaacgccgggctcaatatataccaggggccatcctgctccgtggcgctgataatagccctggcatagcccccggtgatttttccctgctcctcaagcgggcggcaggcgagatgaacggcgctgcgccagctcaggcagtcgctggtgaactgacaggcggaaaatagcctctcttccataaacgttccctttacgcgcgagccgaccgccaactgatcggctcgcctggtggttagcgtagcgcgttaaacagcgcgtctcccgagatgccatatttcgcttttagctgcctgctattacccgattcggtaaatgtgtcctgcgttcccagacgcgtaaggcgcgccggatgtgccttttgcgccagggtttccgcgatcaggccgccgaggccgccgttgacggtgtgattttcaagcgtagcgataagcgggcagccttcgaccagccgataaaatgcctgctggttgaagggtttgacggttgcaacgtgaataagcttgccctttttgccgctggcgagcagcttttcatagccgtcggtagcctgttccagtaccgttccttcaaacagaatcgcaaaatccgcgccgctgtcggcgatggcggcgatatcgctgacccgcggaacgacgcttttgtcgcgaaccggcatcggctcgcgcgccacgcgaatataaacgggtccctttatttttgccgcctgctcgaaggcctcggcgatttcttccgcatctgccggggtcaggacggttaaccccggaaggacgcgggtcagcgctaaatcctccagcgcatggtgtgaagcgccgtccgggccatcatccataccggggtggctaccgacgagtttgatgttggctttggcatagcacgcctgccgcagctgggtccaggcggtgccggtgacgaacatcgcaaagttaacatagaagggcataaagccttccagcgcctggccggccgcgaagctcatggcggaaccttccgcaatgcccatttcgaaaaaggcctccggatagacggcctgaaactggtcggtacgggtagagctggctaaatcgctgtcgataacaacaacgggatagcccttttcttttagcgcaatcagggcatgcccgatctcatcacggggtgctttcatcactgtaactcctccatcgcctgctgaaattgttctttgctcggggtttttgagtgccagtcgccgttgttttccatatagctgacgccggaacctttggtggtgcgcgccacgatggcgacaggtttacctttcaggtgacgggatagcatcagggtatcggcaacctgatgcatatcattgccgttgtgcagttccagtacatgccagccaaagctgcggattttgtccgccagcggctcgagattaacgacgtcattgaccggatcgtgggaagagaagccgttgtaatcgatgatggcgaccagattatccattttcatatgcccggcctgctgtaaggtttcccagatttggccttcatgcatttcgccatcgccaacgatggcaaatacccggtgcggatcgttgcgccgctttttggcggccgccataccaaaagcaatcgacagcccctgacccagcagtccggttgtcgcatcgacttccggcagcgacttaatgctcgggtgcccctgcaggcgcgagttgatctgtcggaacgtattgaactcgctgcgctcgatcttgccttgttgatacagcatggcgtactgcgcggcgacggcgtggcctttactcatcaccacgcgcgagcggggggaggcggccagatcgacttcctggtaatagagccaggtaagcacgtcgattattgacagcgccccgcccggatggccaattccggactcgtaaatcatggtgacgatctcgcggcgggcggcaagcgcgtgggatttcagttcatcaatgttcatgttcattccttcttagggcagcattttaccgatgtagtacacgaccagacccagagcgacgaagtcggtttccgggaagctggtgcctgaaagaccgacggattccataatcgggtaaatcagcgccgggccgatgccgatcaggatcccggtgataaagcttccggcaatcgcgcctttccagccgccggaggcattaccaaataccgctgcggtcgcgccaatgaagaagtagggaatggctaccgggataatcacggtttggccaaggatcgccagaaagcccatcaccaccagcccgccgacaaacgaagagataaaccccagcaccgtggcggtcggggcgtaggggaagaccaccgggcagtcgagcgcgggtttggcgttaggaataaacttctccgagatgccgaggaaggccggaacaatttctgacagcagcaggcgtacgccggtaatgatgatgtacagcgaagcggtaaaggtcagagactgaaagagcgggtaaaccagccagtgcatcccgcctgccgctgcggtgaccgcggcttttccggcagcgagcgcggcgatgtagtagaagatgctcaccgagatcgacaccgagacgatgtaatctttaaagatccccagccagccgggaagattcagcttttcggtggattgtttcggatcgccgacctttgcgccaatccagccggaggcggcgtaggccagggtgacgtagtgccccatcgcgatctcatcattaccggtaatttttcgcatccacggttgcgcaatggccggatagaggcaggcggcgagacccagcagcacggagccgacaatgatggtcgtcatgtcgctgtagcccagcgctttcagcgttacggtaagcagcgcggagagataaagattatgttgcccggtaagaaagatatatttaaacggcgtcacgcgggcaaaaaacaggttccagccaaaaccaatcaccatgatcagcgacacgcacatggcgaatttggtttgcgccagtccggttagcgcttctgccagcggcatgacgcccttcaggccaaagccatcgctgaataaggtctgaaagttacccagggaagtgactgccagaccggcgccgccggcaaaaaccagaaagccgacgatggttttgaaggtgccggaaaggactttttcaatcggcttgcgttggattaacaggccgattaatgcaataaagccaactaaaagtggggttacgcccagaatgtcgaatacaataaatctgaggaaatccatattgcctccgggagaggttagttgctttgaacgatgtcggtgagcgcagactccatctcttcactgttcatcaggtcggtgatgccgaccgctctgaatccggcggcttcgacttcgtcggtgagatcgcgcatagtgatgacaaaatcaatatctcgccaggtgcgtaaccctgagaggacgtcgtgctccagctcgatattccagccgtgcttgtcgatgattttttgtgctttgattttgagcattaaggagctgcccataccggtacgacagactatgagacctttcattcgatgttctcctgtttgtaaaaataattatttttatttatttgtatgagataataattattatctttgcggcaggacgaaagatgtgactgtgtttgcattttgagcaaataaggcaaaacatgagccagatagacaataacttgttgataagcataagaaacggagcttcagggctaagcccgatactggagaaagttggccgttttattacggaaaatcctgactttgtgatgcgtcacacgatttcagaactggccgactccattgataccagtgaggggagtatcacccgtttttgtcgggcctttggttttaaaggtttctcggatttcagaaccgcgctggcgatggagcagggcgccgcgcgctcggaagaccacggtatcaacgagagcgaagagattgcgccggtgctggcgagcattcgcgacagtaatgccattgtcgataaccaggagctgaaagccgcggccgactggcttaacaccctgaacagcattgctatttatgccgtgggcacggcggtgccggtggcgttgttcctgcagatgaatttaatcaatatgggtaaggcggccagctttatcgatcgctcctatccggcggcgatgccgctgctggctgacagtcaaaaaaccggcatcatcgtcgttcacagcgaacaggcatcggcggatatgatgcaggccctgtcgctggcaaagcagcagggcgttaaaattttatcgctgacccgcgggacgtttgcgccgctggcccgtttatctgactggaatcttcaggcggcggtagctttacagggggaaggggagtcggggtttgcggaaatcgccggcgcaatgatggtggccgaccggatcctcagcgcgctggaagagcaggatgaacgctatgcggaataccgaaaagcgcatcagaagcgcattttctcgattgagagcgtggcgaataagctgtcggaatattttatgtcctgacgctgattttgttggggaaacacccggtagcgcaatctctaccgggtggggattttagtacatcaccttatgaccgtactgttccagaatgcccttcacgcgttccatggtctctttctttggcggatggacgccgtccagcttgtactcttcgcccatggctacccatttgtgcttgcccagctcgtggtacggcagcagttcgattttctcaacgttgcccatgtcacgagtaaactcacccaggcgatgcgcggaatcatcatcgtcggaccagcccggaaccacaacgtagcggatccagacgttgatgtttttgtttgacaggtaacgggcaaactccagcgtccgatggttagagacgcctaccagattctggtgaatttcatcattcatttgcttgagatcgagcatcaccagatcggtgacttccagcagttcatcaataaccgggtcgtagcggcgcacaaagccgttggtatcgagacaggtatgaataccttctttcttacaggcgcggaaccagtcgcgaacaaattcggcctgcaggatagcctcgccgccggatgccgtcacgccgccgccggaagcgttcataaagtggcgataggtcaccacctctttcatcagctcttcaacggtaatctctttgccgccgtgggtatcccaggtatcgcggttgtggcaatagaggcagcgcatcaggcagccctggaagaaggtgataaagcggatccccgggccatcgacggtgccacaggattcaaaggagtgaatgcgaccaattgttgacattgcggtgatatctccgaatttggcccatccggggcctatgtagatgcacagctcaaaggctatgtcgagtctgttttggctgttatccataaagtatagacagcagacaaaagaggctggggcaggatgatattgctaaaaaggccccacttgcgtggagcctttattgtacgctttttactgtacgatttcagtcaataccattacatggtctgagtgaaggtacgagtaataacgtcctgctgctgctctttcgtcagggagttaaaacgtactgcgtagccggatacgcggatggtcagctgcggatatttttccgggttttccatcgcgtcgagcagcatttcgcggttcataacgttgacgttcagatgctgaccgccttcgatggacgcttcgtggtggaagtaaccatccatcaggccggcgaggttagttttacgaacttcgtcgtctttacccagcgcgttcggcacgatagagaaggtgtaagaaataccatctttcgcgtaagcaaacggcagtttcgcaacggaggtcagagaggcaacagcacctttctggtcacggccgtgcatcgggttagcacctggtccgaacggagcgccagcgcgacgaccgtcaggggtgttaccggttttcttaccatacacaacgttagaggtgatggtcagaacggactgagtcgggatagcgttgcggtaggtgtgcagtttctgaattttcttcatgaaacgttcaaccaggtcaacggccatatcatcgacgcgagagtcgttgttaccaaactgcgggtattcgccttcgatttcgaagtcgacagccagaccgttttcgtcacgaatcggtttaactttcgcatatttgattgcagacagggagtcagccgcaacggacagacctgcgataccacatgccatggtgcggataacatcacggtcgtgcagcgccatcagggaagcttcgtagctgtacttgtcgtgcatgtagtggatgatgttcagcgcagtgacgtactgtttagccagccagtccatgaagtgatccatgcggtccatcacttcgtcgaagttcagaacgtcgcctttgatcggttcagatttaggaccaacctgcattttcagtttttcatcaacgccgccgttgattgcgtacagcatggttttcgccaggttagcacgcgcgccgaagaactgcatttgcttaccaacaaccatcgggcttacgcagcaagcgatagcgtagtcatcgttgttgaagtcaggacgcatcaggtcatcgttctcgtactgcagagaagaggtatcgatggacactttcgcggcgtattttttgaagctcagcggcagtttttcagaccacagaatggtgatgttcggctccggagacggccccatggtgtacagggtgttcagaaaacggaagctgtttttggtgaccagagtacggccgtcaacgcccataccgccgatagattcggttgcccaaatcgggtcgccagagaacagttcatcatattcaggggtacgcaggaaacgaaccatacgcagtttcatgaccaggtggtcaatcatttcctgtgcgtcttgctcggtgattttaccggctttcaggtcacgttcgatgaagatatccaggaagctggaggtacgaccgaaggacattgccgcgccgttctgagatttaacggcagccaggtagccgaagtaggtccactggatagcttcctgagcggtggttgccggaccagagatatcgcagccgtattttgccgccatttctttgatctgacccagcgcacggtgctgttcagagatttcttcgcgcagacgaatagttccttccagatcttcgccgttttccagtttctcttgcagagagacgaactgagcgtatttgtctttcatcaggaagtcgataccgtacagcgcaacgcgacggtagtcaccgatgatacgaccacggccataggcatccggcagaccggtcagaacgccagatttacggcagttcaggatgtctttggtgtaaacgtcaaacacgccctggttgtgagttttgcggtattcagtgaagattttcttcagcatcgggtccagttcgcgattgtacgctttgcaggaaccttctaccattttgatgccgccgaacgggataatcgcgcgtttcagcggagcttcagtctgcagaccaacgattttctcgagacctttctcgatgtagccagcgtcatgagaagtgatggtggatgcaagggaagtatcaaaatcaacaggcgcgtgagtgcggttttcctgtttaacgccttccattacggtgtcccacagcttggtggtcgcgtcagttgcgccagccaggaaggactcgtcaccttcgtacggggtatagtttttctggatgaagtcgcggacgttgacttcgttctgccagtcacctttcgcaaaaccttcccaggctgtggctaacttttcattaagctcggacatgtaacacctaccttcttaagtggattttttatttactgcctgaaacaacccttagtgatggtcgtcgccacgcaggtaaatgacccagtatgtcaacccaaccagcagaccaccgccgatgatgttcccgatagttaccggaatcaggttatcagtgatgaagttcatgacggtcaggtgagagaaactttccggagttgaaccgacagcggtccagaattccgggcttgcaaagtcgcggataacgatacccagcgggatcataaacatgttcgcgatactatgctcaaacccgctggcaacaaacattgccaccggtaaaaccataatcatggctttatccatcaggctgcggccggagtagctcatccataccgcaaggcagaccatcaggtttgccaggatacccaggcacacggcttcaacaaaagtatggtgcattttgtggtcggcggtttgcagaacgttaagtccccattgaccgttggcagtcatatattcgcctgaaagccacatcagcaatacaaagagtaagcaaccaatcaggttaccaacatagacgttgagccagtttttcgccagttgaccccatgtgattcttccgctggctttcgcgacaacgataagaacggttgaggtaaacaggtcggcaccgcaaataacgcagagaatcaaacctagtgagaagcagatgcctccaatcagtttggcaaccccgaatggcatcccggctgtgccggttgtcgcggtaatatagaaaacaaaagcgatagagatgaagacacctgcggtgatcgccagataaaacgtctttatcggatgttttgtcgctttatagacacccgcttcttcggcgactttcgccatggcagcagggagtaaaagatcaaaagggttgtcagctttcacactaactctctctttatgtaagttggcggtgagatactaacaaagcattatagaagggaatttgatgtagatcatatcctaccggaactataggccttttgagtgtgtggatttgccttaatgttgacttaatttgttgttttttaatgaaaaaataaattttaaaatttacaaataatgttgattattttcattttacccccgtttttcggttaattaaaatggggtatttttattaaaattaacaatatttgcggtgggattttattatttctcaccactaattaactttatggctacaatcgggctttggggttgcggaaaacataaaaatgggggccttcgccggcccccataatagggttattcaggcagtaaagcgcgcttatttaccccagaatgctgcttttgcgcgctgcagcttttcgtaggctttcagcagcgactgatgagccgggaacgcgagcaggtcgctgtctactgcctgcaggccgtagaaaggcgcttctccgctcagcgcggcgctggcggcttctacggcatcggcgccgtacatgcgtacaaaagcgttcagatactgcagcggctggcgctcctcttcctggctcagcagcagcagggtttgcaggcagcggtagtaattagcgcgctcggcgctaaagatggaggcgttgaactccatggtccactcggtccagattagcgcctgctcgagatcgccgcccgccagcgcgagcatagctttcagctcgccaatgcgcagcgtataccagccgttgtctttgccggtcgccagacccagcagttcgcgcacgcgggtgaagtcatcaaggccttcatcatccatttgttcgataagcgccagataatcttctttttcccactcgctttccggcagggaaagaatcgtttcccgcagaggcgcgcccatgctgttattcgccagccagaggtcttccgccggataaatatcagacatgcccgggacaatgattcggcaggcgtagacgctcaggtgttcgtaatcggcgatgtaaacttctttatcttcttgtttaaagatagccatcagggtggcgaactcttcctccgtggttccggagaagctccagtccacgaacgggtagtcggcatcctgcttaaacatatcccaggagatcaggccgctggaatcgataaagtgcgtttcaaggttcgcatgttcagcgacttcttcatcatcgaaggttggcggcgtgaagacgtcgagatctttcaggctgcgaccctggagcagttcggtaacggtacgttccagcgccacgccgaaatcgggatgcgcgccgaaagaggcgaaacaggtgccgttagccgggttaaacagcacgacgcagataaccggatatttgccgccgagcgaaccgtcataagcgaaaatcgggaaaccttcggcctccagcttattgatcgattcgactacgcccggatagcgtgccattacctccgccgggatctccggcaggctgatgctttcggcgataatgcggtttttaatatgccgttcgaacacttctgagaggccctgaacgcgggcttcgttgcgggtgttgcccgcggacatcccgttagaaacgtacaggttgccgacaatattcatcggaatatagaccgtttcaccatcagactggcgggtgaacggcagaccgcagacgccgcgatcgtcattccctgactgcagatcgaccagcatgctggcggttaactgatcgtcaggatcgtagaacgcgcgcaggcgggtatccagcaggccttccggtacttcgtcatcgtcggttaacgggaaccatttttcattcggatagtgaacgaagggaccgttggcgatagtctcgcccagccagaagtcggcaaagaaatagttggtcgagagacgctcaaagtactctccgagcgcggaggccagcgcggcttttttggtggcgcctttgccgttggtgaagcacagggcgcactctttatcgcggatatgcactgaccagacgtgcggaaccgggttgagccatgaggcctcttcaatatcgaatccgaggtcgtgcaacttctgctggaagcgagcgatggaatcttccagggcggcatctttgccgggaataaatgtttgagtcatggcagtcacttttatcgtacgtaaagcgcgcaatgatacgggttttagatgacgggtgctatctccatcgtctggctatgcttatgtcactcaataactgttcaggcgttaatcatgaagacatttgactggcatcgtatggcactggataaagtgcccgtggaatttctggccgaggtggcattacggagcctctacaccttcgtactggtatttatttttctcaagataaccgggcggcggggcgttcgtcagatgtcactgttcgaagtgctcatcattttgaccctcggttcggccgcgggcgacgtcgcattctatgatgacgttccgatgctgccggtactggcggtttttatcactctggccctgctgtaccgattgattatgtggctgatggggcatagcgaaaaactggaggatctgctggagggtaagccgattattgttgtggaaaacggcgagctggcctgggagaaactgcaggcggaaaacatgaccgaatttgagttttttatggagctgcgaatcagcggggttgagcaactggggcaggtgcggctggctattctggaaaccaacgggcagatcagcctctatttctatgaggatgacgatgttaaagccggactctccattcttccttcccgctttaccgatcgttttaccacgataccccgggacgacgagtatgcctgcgttcgctgtagcgcaatccttacgctacgagccggggataaacaattatgccctcgctgcgcaaatgcagaatggtcgaaggtcagccgggcaaaaagagtcacctgacagcaattatgtcggttttatgacgtcaagctggcagattcttttgtgtgagcgaggccgcatttccccgacgctcagttttagccattgcggtgcgtgtcactgaatgataaaaccgatagccacaggaataacttatgcccgcgacggttcgcgggtaaataacatagcaagtggtgaggggaaatggctcaggtctataacttcagttcaggcccggcaatgctgccggcggaagtactcaaactggcacaaaaggaactgtgcgactggaacggtttggggacgtcggtgatggaaatcagccaccgtggtaaagagttcattaaggtggctgaagaagcggaacaggattttcgctccctgctcaatattccttccaactataaagttttattctgccacggcggcggtcgcggacagtttgccggtatcccgctgaacctgcttggcgataaaaccgttgccgactacgtcgatgccggctactgggcggccagcgcggtaaaagaagcgcataaatactgcacgccgaacgtgatcgacgccaaaatcaccgttgacggcctgcgcgcggttaagccgatgagcgaatggcagctgacccctggcgcggcctatctgcactactgcccgaacgaaaccattgacggtattgccattgaagaagcgccaaactttggcgacgatgtggtcgtcacggcggatttgtcatcgacgattttatcccgtgaaattgacgtcagccgctatggcgtgatctacgcgggcgcgcagaaaaacatcggtcccgcaggtctgacgctgattattgtgcgcgaagatctgctgggtaaagccagcgtagcctgcccgtcgattcttgattactccatcctgtccgccaatgactccatgtttaacacgccgccgacgtttgcctggtacctgtcaggtctggtgtttaaatggctgaaagagcagggcggcgttgccgctatggataaaatcaaccagcagaaagccgacctgctttatagcaccatcgataacagcggtttctatcgcaacgatgtcgctgcggcgaaccgctcgcgcatgaacgtgccgttccagctggcggacagcgcgcttgataaactgttcctcgaagagtcctttgccgcaggtttgcatgcgctgaagggccaccgcgtcgtgggcggcatgcgtgcttccatttataacgccatgccgctggcgggcgtgaaggcgctgaccgactttatgcaggacttcgaacgccgtcacggttaatcgccgccgcgttttttcatccccgcagccggtctgcggggtttttattctgtttgtttgagagttgagtttaatggaatccctgacgttacaacccatcgcacgcgtagatggcacgattaacctgcccgggtccaagagtgtctctaaccgtgccttgctgctggcggctttggcccgcggcacgacggtgctgaccaacctgctggatagcgacgatgtacgccacatgctgaatgccctgagcgcgctgggagttcattacaccctgtcttccgatcgtacccgctgtgaagtcaccggcaacggcggccctctgcaggcggctgaagcattagaactgttcctcggtaatgccggaacggcgatgcgtccgctggcggcggcgttatgtttaggccgtaacgatattgtgctgaccggcgagccgcgaatgaaagagcggccgattggccacctggttgacgcgctgcgtcagggcggggcgcagattgattacctggagcaggaaaactacccgccgctgcgcctgcgcggcggtttcagcggcggccaggttgaagtggacggcagcgtttccagccagtttctgaccgcgctcctgatgaccgccccgctggcgcctcaggataccgtcatcgcgattaaaggcgatctggtttccaaaccttatattgatattacgctacacctgatgaaaacctttggcgttgaggttgaaaatcagtcttaccagcgttttatcgtacgcggcaatcaacactaccgctcgccgggcgactacctggttgaaggcgatgcctcctcggcatcctacttcctcgccgccggcgcgattaagggcggaacggtgaaagtcaccggtatcggccgcaacagcgtccagggcgatatccgttttgccgatgtgctggaaaaaatgggcgcaaccatcacctggggcgatgacttcattgcctgcacccatggtgaactgaacgccatcgatatggatatgaatcatattccggatgcggcgatgaccatcgccacggcggccctgttcgctaagggcaccacgacgctgcgcaacatctataactggcgtgtcaaagagaccgatcgtctgtttgcgatggccacggagctgcgtaaagtgggggcagaggtggaagagggggaggattacatccgcattactccgcccgcgaagctccagtttgctgagatcggcacctataacgaccaccgtatggcaatgtgcttctcgctggtggcgctttccgatacgccggtcaccatccttgatccgaagtgtacggcgaaaacgttcccggactacttcgagcagctggcgcgaatcagtacgctggcctgaataacgcgcgtttaaggtaaaaacgccggccatcgtgtcggcgtttttttatgcccgcgagttaaatcggcaagccctggcgcagtacgttcgcgctggcatcgccgcagattaacggtaaaacggcatcatcttccgggctgttgctctgtcagcccgctataattgcacaattcttccacaggagatttcctgttatccgtaatttacaagcaatgctcactttccgtcgaagagatgcgtataatgcgcggcgtttatatattgatgcgccttgctgaaggagaaaaagatgacggcaacagttccggtaatcaccattgatgggcctggcggtgcgggcaaaggcaccttatgcaaggcaatggcagaaacgctgggctggcatctgctcgactctggggcgatttatcgcgtgcttgctcttgctgcgctacatcatcatgtggatgttgaatccgaagaggcgctggtgccgctggctgcgcacctggatgttcgttttgtctccactaacggtagcctggaagtggtgctggagggggaggacgttagcgctgagattcgcactcaggatgttgccaacacggcctctaaagtggcggcttttccccgcgtgcgtgaagcgttgctgcgccgccagcgggcctttcgcgaattgccaggcctgatcgccgacggacgcgatatgggcaccgtcgtattccctgatgcgcaggtgaaaattttccttgacgcctccgcggaggaacgtgctcatcgccgcatgcttcagttgcaggagaagggctttagtgttaactttgatcgccttttatccgagataaaagagcgcgacgatcgcgatcgcaatcgtacagtcgcgccgctgatcccggctgccgatgctttagttcttgattcaacagaactaaacattgagcaagtgattgaaaaagcgctacactatgcgcgcgaaaaactggcttccgcttaatcgtcttatcgataaagcacaacagcctccgaattatagcagtacccccgcagcaatggagtgttagcgggtatgttaaacaaccccatccggcatggagccaggtggacgttaaatatgaaacctgaagattaaacatgactgaatcttttgctcaactatttgaagaatccttaaaaacaatcgaaacccgtccgggttccatcgttcgtggtgttgttgttgctatcgacaaagacgtagtactggttgacgccggtctgaaatctgagtctgccattccggcagagcagttcaaaaacgcccagggcgagctggaaatccaggttggtgacgaagttgacgttgctctggatgcagtagaagacggcttcggtgaaaccctgctgtcccgtgagaaagctaaacgtcacgaagcttggatcacgctggaaaaagcttacgaagacgctgaaactgtagtcggtattatcaacggcaaagttaaaggtggcttcactgttgagctgaatggtattcgtgcgttcctgccgggctccctggtagacgttcgtccggtgcgcgatacgctgcacctggaaggcaaagagcttgaattcaaagtcatcaagctggaccagaaacgtaacaacgttgttgtttctcgtcgtgccgttatcgaatccgaaaacagcgcagagcgcgatcagctgctggaaaacctgcaggaaggcatggaagttaaaggtatcgttaagaacctcactgactacggtgcattcgttgatctgggcggcgttgacggcctgctgcacattaccgatatggcatggaaacgcgttaagcatccgagcgaaatcgtaaacgttggcgacgaaatcactgttaaagtgctgaagttcgaccgcgaacgtactcgtgtatctcttggcctgaaacagctgggcgaagatccgtgggtagctatcgctaagcgttatccggaaggtaccaaactgaccggtcgcgtgaccaacctgaccgactacggctgcttcgttgaaatcgaagaaggcgttgaaggcctggttcacgtttccgaaatggactggaccaacaaaaacatccacccgtccaaagttgttaacgttggcgatgtagtggaagttatggttctggatatcgacgaagaacgtcgccgtatctccctgggcctgaagcagtgcaaaaacaacccatggcagcagttcgcggaaacccacaacaagggcgaccgtgttgaaggtaaaatcaagtctatcactgacttcggtatcttcatcggcctggacggcggcatcgatggcctggttcacctgtctgacatctcctggaacgttgcaggcgaagaagcagttcgtgaatacaaaaaaggcgacgaaatcgcagcagttgttctgcaggttgacgcagagcgcgagcgtatctctctgggcgttaaacagctcgcagaagatccgttcaacaactgggttgcactgaacaagaaaggcgcaatcgtaaacggtaaagtcactgcagttgacgctaaaggcgcaaccgtagagctggctgacggcgttgaaggttacctgcgcgcttctgaagcttcccgtgaccgcgttgaagatgcaactctggttctgagcgttggcgacgacgttgaagctaaattcaccggcgttgatcgtaaaaaccgcgcaatcagcctgtctgttcgtgcgaaagacgaagctgacgagaaagatgcaatcgcaactgttaacaaacaggaagatgcaaacttctccaacaacgcaatggctgaagctttcaaagcagctaaaggcgagtaatcttagtctttcgggttacaacaacctgaattacgacgagtttacttgacagattgcaggattcgtcctgtaatcaagcacaaagggcggctacggccgcccttgtttaagctgttagctaattttgccttgaaggaaaccggaggaataatgaccaagtcagaattgatagaaagacttgccagccagcaatctcacattcctgcgaaagcagtggaagatgctgttaaagaaatgctggagcatatggcctcaacgcttgctcaaggcgagcgcattgaaatccgcggtttcggcagcttctctctgcattatcgagcaccccgcaccgggcgtaacccaaagactggcgataaagttgaactggaaggtaaatacgttccccactttaagccgggcaaagaattacgcgaccgcgccaatatttacgaagagtaagtttcgccgatcggcgacaacatacttaaacgttaaaaaagcaccttcgggtgctttttttatgcctttaaatctctctttgaagtgacctcgcaaaacgcgggttctgttgcgttaacgcagtagattttgcggatggcgcggcgcagttcctttccttgcctggcgacactctccccgtttagcgtaacactccctctgacagggaggtgctaatgcgtttaccacaacttgccggctgtgtgattctcggtattctgccgctgctctggctgccagtactgcccgggcggtgggttatctgggggctcatggccctggcgctactcattgcgcaatgtcgacgcagacctgcgcaatatgcggcattgataacgctgttttttgtctggggagccctcagcgcaggcgaggtactgtggccgacggagaggttaacggacaggaatcgccaggttgacgttgagctaaccgcaacggacgggcagacaacgcatcaggggaagattatccgtctggatgggcgacggctgtttcctgcgccagggattagcctctacggcagctacctgccagaaacgccctgcgcaggtcaggtttgggcaatgacgctgcgcgcgcgtccggtacacggacagctcaacgatggcgggtttgatagccagcgtcatgcattgtcgcagcatcgtccgttaaccggacgctttatcaccgctgacgttcgggtgcggacctgtagtttgcgagcgcgttatcttgcttcgctgaatcaaacgctgaacgcgttgccgtggcaatcggtgatgctagggttaggcatgggggagcgtctggcgataccgcgcgagataaagaccctgatgcaggaaaccgggacatcgcacctgatggcgatttctggcttacatatcgcgctaggggcttcattgggctggttgctgctcagaggtgtgcagttttttctcccgtgccgctggcttggctggcgggcgccgctgctcgttggcctggcgagcgcgattttttacgccgggctgaccggtatgcagccacccgcgttgcgcacctgcgtcgcgctggccgccggctgcacgctgcggctatccggaaaacgctggtcgccatggcagctatgggtctgctgcattggcgcaatactgtttgccgatccgctggcggtgttgtccgaaagcctctggctttccgcgtttgccgttgcggcgcttatcttctggtatcagctggcgccgatgccgggcggcaaaaggagcgggctactgcgtcaaagcctcgcgttatgtcatctgcagatcggtttaatgtttttacttgctcctctacagatcgcactttttcacggcatcagcctgacgtccgtgctggccaacttgattgccgtgccgctggtgacctttgtcgttgtcccgctaattctgaccgcgatgtttttacacctctgcgcgccgtttatcattgagatggcggtctggcaatcggcggaccgtgttctggccgcgctattctggttcttacgacagctaccgcccggctggctggcgctggatgcgcgctggcttgggataagcttgctgccgtggctggcgttaatcgtctggcgttttcatgcgtggcgcacgttgcccgcgttttgtttagcatttctcgggctattgagctggcccttctggcggagcacggctgctaacgaatggcgagtcaccatgctggatgtcgggcaggggctggcaatggtgattgaacgcgagggcgcggcgcttctctatgataccggcctggcctggcccgagggagacagcggtcagcagatcattattccctggctacgctggcatcatttgcagcttgaaggcgtcgttctcagccacgagcatctcgatcaccgcggcgggctaaattcggtgttaaaggcgtggccccggatatgggtgcgaagccctttaggctgggcgggtcatttagcctgccagcgcggagaaacctggcagtggcggggtttaacctttcgcgcgctatggccgctgcctggagcgacagcgcaggggaataatcgctcgtgcgtggtgcgtattgatgacggtaaacacagtattctgctgaccggggatatcgaaacgcctgcggaacgggcgatgattagccgctactggcagcatcttacgtctacacttatccaggtcccccaccacggcagtaatacctcgtcgggaatcgccctgctgcgtagcgttggcggagaagctgcgctggcttccgcttcgcgctataacgcgtggcgcatgccatcaaccaaagtgattcagcgctaccgaaaacagagttatcagtggttcgacacgccgcatcaggggcaaattacggtggttttttctccggatagctggcaaatccatggcttacgggatcaagttttaccgcgatggtatcatcagtggtttggcgggaaggcgtagaacgggtagaatatgcggctatttcaacacaagctggtttattgaatgcagaacgataaagatctctccacgtggcagaccttccgccgactctggccgattatagcgccgtttaaacccgggctaatcgtggcagcggtagcgttagtgcttaacgcggctagtgataccttcatgctatcgcttcttaaaccgttattggatgatggttttggtaaaacggatcgctcggtgctgatatggatgccgctggtggtgatcgggttgatggttctgcgcggcattaccagctacgtttcgagctactgtatctcctgggtttccggcaaggtcgtgatgacgatgcgccgtcgtttattcagccacatgatggggatgccggttgccttctttgacaaacagtccaccgggacgctgctatcgcgtattacctatgattccgagcaggtcgcgtcttcttcctccagcgcgctgattaccgtcgtgcgcgaaggcgcgtcgattattggcctcttcgcgatgatgttttattacagctggcagctgtcattgattctgatcgtgctggcgccgatcgtgtctattgcgattcgcgtggtctcgaagcgttttcgtaatatcagcaagaatatgcagaacaccatgggccaggtgacgaccagcgcagagcagatgctgaaagggcataaagaagtgctgatgtttggcggtcaggccgtcgaaaccaaacgttttgataaagtcagcaataaaatgcgcctgcaggggatgaaaatggtctccgcgtcgtcaatttctgacccgattattcagctgatcgcctctctggccctggctttcgtgctctatgctgccagcttcccgagcgtaatggagacgctgacggcgggtaccatcaccgttgtcttctcttcaatgatcgcgctgatgcgtccgctgaaatcactgactaacgtcaacgcgcagttccagcgcgggatggccgcttgccagacgcttttcgctatccttgactccgagcaggagaaagatgaaggcacgcgggttatcgaacgcgcgaagggcaacctcgaatttaaaaacgtcaccttcagatacccgggacgcgaagtcgccgcgctgcgcaatatagacctgaatattccggaaggaaaaaccgtggcgctggtagggcgctcgggttcgggtaaatcgaccatcgccagcctgattacgcgtttctacgatgttgatgatgggcagatcttactggacggccacgacctgcgtgaatacaccctgagctccctgcgcgatcaggttgcgctggtgtcgcaaaacgttcatctctttaacgataccgtagcgaataacatcgcctacgcgcgtactgaagagtacagccgcgagcagatagaagaagctgctcgtatggcttatgccatggactttatcaacaaaatggacaatggcctggatacgattatcggggaaaacggcgttatgctttccggcggtcagcgccagcgtatcgctatcgctcgcgccctgctgcgtaacagcccgatactgatcctcgacgaagccacgtcggcgctggataccgaatcggaacgcgctattcaggcggcgctggacgaactgcagaaaaaccgcacctcgctggtgattgcccaccgtctgtcgacgattgagcaggccgacgagatcgtggtggtggaagatggccagatcgttgaacgcggcagccataccgacctgcttgagcacaggggcgtttacgcccagctgcataagatgcagttcggcgcatgattgcacgcatctggtccggtgagtcgccattatggcggctgctgcttccgctctcctggctctatggcctggtgagcgggttgatacggctgagctataaactcggttggcaaaaagcctggcgagcgccggtgccggtggtagtggtgggtaatctgaccgcgggcggtaatggtaaaacgccggttgtcgtctggctggtggaacagctccagcagcgcggtattcgcgttggcgtcgtttcacgcggctacggcggtaaagcagcgagctatccgctgctgctcaatacggctacccccacagcggaagcgggcgatgagccggtgctgatttaccagcgtaccggcgcgccggttgccgtctcgccggtacgcagcgatgcggtacaggccctgctcgccgcccacgatcttcagcttatcgtcacagacgatggcctgcagcactataagctggcgcgcgacaaagaaattgtggtgattgacggcgtgcgccgttttggcaacggctggtggctgcctgccggccccatgcgcgagcgcgcttcgcgtttacgcagcgtggatgcggttatcgttaacggcggtctcgcccgtccgggagagatcccgatgcagcttcgccccgggcaggcggtaaatctgctgaccggtgaacgccgggatgcggcggcgttggacaacgtggtggcgatggccggaatcggccacccgccgcgcttcttcgccacccttgaaagctgcggcgtcagtccggtaaaaaccgtcgccttagccgatcatcaggcattggcgcagagcgcagtcgccgcgctggcgacgccgcagcaaaccctgctgatgaccgaaaaagatgcggtgaagtgccgcgaatttgctcaggcaaactggtggtatcttccggtcgacgcgataatgactgaccaacgcgcgcagcggttgctcacggacttagttaccctggcgcaacgctaatcgtcgtatcaccgcttgcgccggaacccttaacggagaagctgcatgccggtattgtccctctcgcttaaagaagcccgccatcttcaccttgccgctcaggggctgctaaaaaagccccgtcgccgcgcaaagcccggggatattctgcagaccattaagcagatgtccctgctgcaaatcgataccatcaatgttgttgcgcgcagtccttatctggtgctgttcagccgcctcggccactatccgcagcgctggctggacgaggcgctccgcgccggcgagctgatggagtactgggcgcacgaagcctgctttttaccgcgcagcgacttttcactggtacgtcaccgcatgctgacgccggataaaatgggctggaaatatcacaaagcgtggatgaccgaacacgccgagggcattcaggcgctgttggcgcatatagccgaaaatggcccggttcgctcggccgacttcgagcatccgcgcaaaggcgccagcggatggtgggagtggaaaccgcataagcgccatcttgaaggcttattcacagccggtgaagtgatggttatcgagcggcgtaattttcagcgcgtttacgatctgacgcagcgggtcatgccggactgggacgatgagcgcgatgggctctctcaggagcaggctgaagccatgatgttacgtaatagtgctcgcagcctggggatttttcgcgcgcagtggctggcggattattatcgtctgcgtcagcccccgctgccgctactgctggcgagctggcaggaggaggggctggtggtgccggttaacgttgaagcgctgggcgaaatgtggctccaccgtgatgcactggcgctgctggaatcttcacccggcggtaggctcgccgccagccgcagcgcggtgctttcgcctttcgatccggtagtctgggatcgcaaacgagcggaacagctgtttaactttacctatcgcctggagtgctacacgcccgcgccgaaacggcagtatggctatttcgtattaccgctgctgcaccaggggagactggttggcagaatggatagcaaaatgcaccgcaaaaccggcgttctggaaattatcgccctgtggctggaggagggcgtcaaggtgacgtcgggtctggagagcgggctaaaacgcgccattgatgattttgccctctggcaggacgccacgcgggtgagctgcgggaagctgccggcggaactttttgccgggcggcaacagggttgggaaattgacgctgcctgagcccacgtgtgatatgctgctgaagaatctattcggtccatctggaggaatcatggatcaccgtttacttgaaattatcgcctgtccggtttgtaacggtaagctgtattacagccaggataagcaagaactgatctgcaaacttgatcgcctggcttttccgctgcgtgaaggcattcccgtactactggaaaccgaagcccgcccgcttcctgtagaagagagccagtcatgagtttcgtggttattatccccgcgcgcttcgcttctacccgcctgccagggaaaccgctccaggatatcaacggcaagccgatgattgtccatgttctggaacgcgctcgcgaatccggggccgagcggattatcgttgctaccgaccatccggacgtggcccgcgcggtggaagccgccggcggtgaagtctgcatgacccgtgaagatcatcagtcaggcaccgaacgcctggccgaggtggttgaaaaatgcgccttcagcgatgacaccatcattgtgaatattcagggcgatgagccgatgatcccgcccgcgatcgtgcgccaggtagccgagaatctggctgccagcaccagtggtatggcaaccttagcggtgccaatccacgatgcggaagaggcgtttaatccgaatgcggtgaaggtcgtcatggatgctgagggctacgcgctctatttttcccgcgccaccattccgtgggatcgcgatcgtttcgctaaatcccgcgagtctatcggtgattcgctgctgcgtcatatcggtatttatggctatcgcgccggttttattcgtcgctatgtgagctgggcgccgagcccgctggagcaaatagagatgctcgagcagctgcgcgtgctgtggtatggcgagaaaatccatgtcgcggtggcggaagtggttcccggtacaggtgtcgatacgccggaagatctggagcgcgttcgcgcggagctgcgttaatcccccccatcccctccgccaggaggggatatccccaggccgttattccatacttttttacgtcaattttgatctcacccgatgacaaccccggcccaggcgctcattatgaaaccggtagtattcataggggtaatcagaaatggaacagttgcgtaccgagctgagccacctgctgggtgaaaaactaagccgcgtggagtgcgtcagcgagaaaccgtcgtcggcgctgtggtcgctatatgatgcgcagggaaacccaatgccgctgctggcgcgcagctttacgacgccgggcgtggcgcgtcagctggcgtggaagatatcaaccctggcgcgaagcggcaccgtccgtatgccggttgtctacggcgtgatgacgcacgacgagcatccgggtcccgatgtactgctgattgaacgactgcgcggcgtctcggttgaagcccccgcccgcacgccggagcgctgggagcagctgcaggagcagatcgtggaagcgctgctggcctggcatcgtcaggatagcggcggctgcgtcgggatggtcgatagcactcaggaaaatctctggccgtactggtaccgccagcgcgtggaggtgctatggagtacgctgaatctttatcaggataccggcctgacgatgcaggacaaacgcatcctgttccgcacgcgcgaatgccttatggatttgtttaaaggtttcaatgataactgcgtgctggtacacggtagcttcacgctgcgcagcatgcttaaggatccgcgcagcgatcagctgctggcgatggtggggccgggcatgatgctctgggcgccgcgggaatacgagcttttccgtctggccgagagcggtcaggaagaggagctgctgtggcactatctgcgccgggcgccggtggcggaagcgtttctctggcggcgctggctgtatctgctgtgggacgaagtggataatctggtgaataccggacgctttgaccgcgtccggtttgacctggcggcaaagtcaatcctgccctggctcgcctgaagaaccttttagccactgccagatgcggcctaacgtttcgtaacccacccgatcgctatgcatgagccagacgggcgaaggaatagcccgctcccacgggttaagcggtgactcaatcgccagctggttggccggcgcgggcaggggagttagcccggcgcggcgaaagaaaatcatcgcccgcggcagatgagaggcggaggtgaccagcaggaacggcgcatcgcctatcgccatcttcaccgcagcggcttcctcttcggtatctttgggtttatccaggacaaggatttcgctgcgcggtatgcccaggctctctgccactctggccccggcttctgccgtactgaccggatttgtttttgccgctgcgccggtaaagatgagtttcgagcccggattttcataccacaggcggatcccctccgtcagccgcggcaggctattattgatgagattggaactgggcgcccagtccgggttccaggtgtagcctccgccaagcacgaccacgtactgcacgcgcttttcacctcgccacgtcgggtacttatcttcaattggcttgagcaggctatcggcgaccggttgcaggctcaacagcagcaacagcagccagccgaggctgacgcagagcttgccggtgcgctggaaacggctaaaccacagcagggctatgccgagcgcaatgagcagcagcagcaggggaagcggcagcatcataccgcctaaaacctttttcagcgtaaaaagcatgccgtacggttccttttttaaccatataaccaaagatatgcccggatcttacaacagatcgcttcattctccgcgcgggtatgacaaaatagcggctttgtgttggcgtgtggagtcacccgtgcaggatcgtaatttcgatgatattgctgaaaagttttcgcgcaatatatacggcaccaccaaaggccagctgcggcaggcgatcctctggcaggatctgcaaccgctgctggaccggctggggcctgggccattgcgagttcttgacgcgggcggcggcgaagggcagacggcgatcaaagtggcggaaatggggcatcacgtcacgttatgcgatctctctggtgaaatggtggctcgtgcccggcaggcggctgccgataaaggtgtgatcgacaacatgcattttgtacaatgcgcggctcaggatattgagcagcatttggaaagtccggtcgatctgatactgtttcatgcggtgctggagtggatagccgaaccacaggcgatgttgcgtaccctgtggtcgatgctgcgccccggcggcgcgttgtcgctgatgttctacaatgctaacggtctgttgatgcacaatatggtcgccggaaatctcgactatgtgcaaatcggcatgccgaaaaagaaaaaacgcacgctgtcgccggactatccgcgcgatccgcagcaggtttacggctggctggaagagattggctggcagattaccggcaagaccggcgtgcgggtgtttcatgattatctgcgtgaaaaacaccaacagcacgataaatttgcggcgctgctggagctggaaacgcgctactgtcgccaggagccgtatattagcttaggccgttatattcacgtcaccgcgcttaagccgcagatgcaaggataaactatgagtgaattttcccagacagtccccgaactggttgcctgggccaggaaaaatgatttttctatttcgctgccggtcgacagactctcttttctgctggcgattgccacgctgaacggcgagcggatggaaggggaaatgaccgagggagaactggtggatgcgttccgccacgtgagtgatgcgtttgagcagaccagcgaaaccatcagccagcgcgccaataatgccattaacgatatggtgcgccagcgtctgctgaaccgctttaccagcgaaatcaccgagggtaacgctatttatcgcctgacgccgctgggcattgggatcaccgactactatattcgccagcgcgagttctccaccctgcgactgtcgatgcagctctccatcgttgccagcgaactcaagcgcgccgccgactcggcagaagagggcggcgatgagttccactggcatcgtaacgttttcgctccgctgaagtactcggtagcggaaatctttgacagcatcgacctgactcagcgaatcatggatgagcagcagcagctggtgaaagatgatattgcccagctgctgaacaaagactggcgggcggcgatctccagctgcgagctgctgctgtcggaaacgtccggcaccctgcgggaactgcaggataccctggacgcggcgggcgataagctgcaggcaaacctgctgcgtatccaggattcgaccatggcgcgcgacgatctgaattttatcgatcgtctggtgttcgatctgcaaagcaagctggaccgtatcgtcagctgggggcagcaggcgattgacctgtggatcggctacgatcgccacgtgcataaatttatccgtaccgccattgatatggataaaaaccgcgtcttcgcacagcgtttgcgtcagtcggtgcaaacctacttcgacgccccctgggcgctcacccatgcgaatgccgatcgtctgcttgatatgcgcgatgaagagatggcgctgcatgatgaagaggttaccggggaacttccaacggatctggagtacgaagagtttaacgaaattcgcgaacagctggcggcgctgattgaaggacagctggtggtctataaagagaagggactgccgctggatcttggcctggtggtacgcgaatatctgtcgcagtatccgcgcgcgcgccactttgacgtcgcgcgtattgtggtcgaccaggcggtacgtttgggcgtagcgcaagcagatttcaccggactgccggcaaaatggcagccgattaatgattacggagccaaggtacaggcgcatgtcatcgacaaatattgaacaagtgatgccggttaaactggcgcaagcgttggctaatccgttatttccggcgctggatagcgccctgcgcgcgggccgtcatatcggccttgacgagctggataatcacgcatttttaatggattttcaggattacctggaagagttttatgctcgctacaacgtcgagctgattcgcgcgccggagggttttttctatctgcgcccgcggtcgaccacgctgatcccgcgctcggtgctctccgagctggatatgatggtgggtaaaattctctgctatctctacctcagcccggagcgtctggccaacgagggcatcttcactcagcaggagctttacgacgagctgctgaccctcgcagacgaagccaagctgctcaagctggtcaataaccgttctaccgggtccgaccttgaccgccagaagctgcaggaaaaaatgcgcgcttcgctcaaccgcctgcgccgcctcggcatggtgtggtttatgggccatgacagcagcaaattccgcattaccgaatcggtgtttcgcttcggcgccgacgtgcgcgccggtgacgatccgcgcgaagcccagctgcgtatgatccgcgacggtgaagcgatggcgctggaaaatcgcctgcagcttaatgatgagaatgaagagaatcagccggatagcggggaggaagagtaatgattgaacgcggtaagtttcgctcgctgacgctggttaactggaacggtttttttgcccgtacttttgatctcgatgaattagtgaccacgctttccggtggtaacggtgccggtaaatccacgaccatggccgccttcgtcaccgcactgatcccggacctgacgctgctgcactttcgtaacaccacggaagcgggggcgaccagcggctcgcgcgataaaggcctgcacggtaagctgcgcgctggcgtctgctactccgtgctggacgtgatcaactcccgccaccagcgcgtggtggtcggcgttcgtctacagcaggtcgccggtcgcgatcgtaaagtcgatatcaagccttttgcgatccagggcctgccaacctccatccagccaactcagctgctgaccgaaacccttaacgagcgccaggcgcgcgtggtgacgctcaacgagctgaaagataagctcgaagcgatggaaggggtgcagttcaagcagtttaactctattaccgagtatcactcgctgatgttcgacctgggcgtggtggctcgccgcctgcgttcggcttcggaccgtagcaaatactatcgcctgatcgaagcctcgctgtacggcggtatttcgagcaccattacccgctcgctgcgcgactacctgttgccggaaaacggcggcgtgcgtaaggcgttccaggatatggaagcggcgctgcgtgaaaaccgcatgacgctggaagctatccgcgtgacgcagtcggaccgcgacctgttcaagcatctgatcagcgaagccaccaactacgttgccgccgactatatgcgtcacgctaacgagcgacgcattcatctcgacaaggcgctggagtatcgtcgcgatctgttcacctcccgcgctcagctcgcggcggaacagtataagcacgtcgatatggcccgcgagctgcaggaacataacggcgcggaaggcgatctggaagccgattatcaggccgccagcgaccatctgaacttggtgcagaccgctctgcgccagcaggaaaaaatcgagcgctatgaagcggatcttgatgaactgcagattcgcctcgaagaacaaaatgaagtcgtcgcggaagcggttgaccagcaggaagagaacgaagcccgcgccgaagccgccgagctggaagtggatgagctgaaaaaccagcttgccgactaccagcaggcgctggacgtgcagcagactcgcgcgattcagtacacccaggcgctgcaggcgctggagcgggcaaaagccctctgccatctgccggatttaacgccggagagcgccgacgagtggctggaaactttccaggcgaaagagcaggaagcgacggagaaaatgctgtcgctggaacagaagatgagcgtggcgcaaaccgcgcacagccagtttgaacaggcttaccagctggtggcggagatcaacggcccgctggcgcgtaatgaagcctggaacgtggcgcgcgagctgctgcgcgaaggcgttaatcaacgtcatcaggccgaacaggcgcacgggctgcgcagtcgtctgacggagcttgaacagcgtctgcgtgaacagcaggatgccgaacgccagctcaatgagttctgtaagcgccagggcaaacgctacgatatcgacgagctggaagccctgcaccaggagctggaagcccgcatcgcatcccttgccgacagcgtttccaccgccagcgaacggcggatgaccctgcgtcaggagctggaacagctacagtcgcggacgcaaacgctgatgcgccgcgcgcccatctggctggcggcgcagaacagcctcaatcagctgtgcgagcagagcggcgagcagtttgagtcaagccaggacgtcaccgaatatctccagcagctgctggagcgtgaacgcgaagctatcgtggagcgcgatgaagtcggggcccgcaagcgcgctatcgacgatgaaattgagcgtcttagccagccgggcggttcggaagatcagcgcctgaacgcgctggcggaacgttttggcggcgtactgctgtcggaaatctacgatgacgtgagtctcgatgatgcgccgtattactccgcgctctacggtccttcccgccacgccattgtggtaccggatctgtcgctgattgccgatcagctggaaggtctcgaagattgtcccgaagatctctacctgatcgagggcgatccgcagtcgttcgatgacagcgtattcagcgtcgatgagctggaaaaggcggtggtcgttaagattgccgatcgtcagtggcgctattcacgcttcccgacgctgccgctgtttggccgcgccgcgcgtgaaagccgcgttgaaacgctgcacgccgagcgcgaaagcctgtccgagcgctttgcgaccctgtcgtttgatgtgcagaaaacccagcgcctccatcaggcgttcagccgctttatcggtaaccatcttgcggtagcctttgaggacgacccggaagaagaaatccgtaaactgaatacgcgtcgcggcgaactggagcgggcgctgaccgcccatgagagcgataaccagcagaaccgggtgcagtatgagcaggcaaaagagggcgtatccgcactcaaccgcctgctgccgcgtctgaatttgctggccgatgactcgctggccgatcgcgtggatgagatccaggaacgcctggacgaagcgcaggaagccgcgcgcttcgtccagcagcatgggaatcagctggcaaaactggagccgatcgtttccgtgcttcaaagcgacccggagcagtttgaacagctgaaagaagattacgcctattcgcagcagactcagcgcgacgcgcgtcagcaggcatttgcgctgaccgaagtggtgcagcgtcgcgcccactttagctactccgattccgcagagatgctgagcggtaatagcgatctgaacgagaagctgcgccagcgtctggagcaggctgaggcggagcgcgcccgtactcgcgaagcgctgcgtacccacgccgcgcagctcaaccagtacaaccaggtgctggcatcgctgaaaagctcctacgacaccaagaaagagctgctcaacgacctgcataaagagcttcaggacattggcgtgcgcgccgacgccggcgccgaagagcgcgctcgtctgcgccgcgatgagcttcatgctcagctcagcaacaaccgcgcgcggcggaaccagctcgaaaaagcattgaccttctgcgaagcggaaatggataacctgacccgcaggctgcgcaagctggagcgcgattattgcgaaatgcgcgaacaggtggtcagcgctaaagccggctggtgtgcggtcatgcgcctggtgaaagacaacggcgtggagcgtcgcctgcatcgtcgcgagctggcctacctttcggcagatgaactgcgctcgatgtcggataaggcgctcggcgcgctgcgtctggcggtctcggataacgaacacctgcgcgatgtactgcgtatttctgaagatccgaaacgtccggagcgtaaaatccagttctttgtcgccgtttatcagcatctgcgcgagcgtattcgccaggatatcatccgcaccgacgatccggtggaagcgattgagcagatggagatcgaactcagccgtctgacggaagagctgaccaaccgcgagcagaagctggccatcagctcccgcagcgtggccaatattatccgcaagactatccagcgcgagcaaaaccgtattcgtatgctcaaccaggggctgcagagcgtctccttcggccaggtcaacagcgtgcgtctgaacgtcaacgtgcgggaaacccactcgatgctgctggacgtgctgtcagaacagcatgaacagcatcaggacctgtttaacagcaatcgtctgaccttctcggaagcgctggcgaagctgtatcagcgcctcaatccgcagattgatatggggcagcgtacgccgcagaccatcggtgaagagctgctggactaccgcaactatctggagatggaagtggaagttaaccgtggttccgacggctggctgcgcgcggaatccggtgcgctatcgaccggtgaggctatcggtaccgggatgtcgattctggtgatggtagtacagagctgggaagatgaatccatgcgcctgcgcggtaaggacatttcgccgtgtcgtctgctgttccttgatgaagcggcgcgtctggatgctcgctctatcgcgacgctgttcgagctctgcgatcgtctggagatgcagctgattattgcggcgccggaaaatatcagcccggaaaaaggtaccacctataagctggtgcgtaaggtcgtgaataatcacgagcacgtgcacgtcgtcgggctgcgtggcttcgcaccgcagctgcccgaaacgctgccgggaacggcaaatgcttcataggatggtacaataaccagccaaagggcgacgcgatgtcgccctttttgttatccgttcctgtactttaggattgtataatcttttaacttctttacatttgggaaggcaaaagcgttttcgtcttcatatactgaaagtaagccccattttagcgggcagcaatgtgttaacagggggcaagggatgttgctaaagaaacggtatggtcgtcaattgtctgcgctcagcctgagcctggcatttgcatttgctccactgttcaatgtccaggctgaagagcctgaagtggtaccatcggatagctctgccaccatcagcgagctctcttccgcgctaagccaaagcgcaaaccaatccgcggcggtcgcccaaatggccggcgagcaggcgctttctgccgatgcggcagcgaagagccgcgccgggattcaggcgatactgccgtccggttatcaacccgtatttatgaatccgctggtatcgctgtatgcggccagggatatgaaaccgatgtgggataaccgcgaggcggtgcaggcgtttcaacagcagctggctgaggtcgctatcgccggttttcagccgcagttcaccacctgggttgagctgttgaccgacccggcagtgaacggtctggcgcgggatgtcgttctgtctgacgccatgatgggctatctgcattttattagcggtattccgactcagggcaaccgctggctgtatggcacgaaaccgtatgccatgtcgacgccgcctctgtcggtgattaaccagtggcaggtggcgctggataacggttcgctgccgcagtttattgcgggtctggctccgcagcatccgcagtatgccgcaatgcatcaggcgctattagctcaggttgccgattcccgtccctggccgcagctcaccggtaagacgtcgctgcgcccgggggaatggagcaacgatgccggcgcgctgcgcgaaattttacagcgcaccggtatgctggatgacgcggcaaaaattgcgttgcccggtgatgaggtggtgagtccgtccgccgggaaaaaggccaaaagcagcggccgtggcgtttacgatcgccagttagtggagggcgttaagcgcttccaggcgtggcagggactgggcgcagacggcgtgattggtcaggcgacccgcgactggctcaacgtttctcctgcgcagcgcgccggcgtgctggcattgaatatccagcgtttgcgcctgctgccgggtaatctggcgaccggaattatggtgaatattcccgccttttcgctggtctattaccaggacggtagccaggtgctggcatcgcgggttatcgttggccgtccggatcgcaaaacccctatgatgagcagtgcgctgaacaacgttgtggtcaacccgccgtggaacgttccgccgacgctggcgcgcaacgatattctgccgaaggtgcgcaataacccaggctatcttgagcagcacggctatacgatgatgcgcggctggaatagcaaagagactatcgacccgtatcaggtggactgggaaacgataaccgcatcgaatctgccgttccgcttccagcaggctcccggcgcgcgcaattcgctggggcgctataaattcaatatgccaagttcagatgcgatatatttgcacgatacgcccaatcacaatctgttccagcgggatggacgcgcgctgagctccgggtgcgtgcgcgtgaataaagcctcagaactggccaatatgctgcttcaggatgctggctggaatgatgcgcgtatttcagatgcgctaaaacaggggaatacccgctacgttaatattcgccagaatatcccggttaatctctattatttgaccgcgttcgttggcgctgatgggcgtacacaatatcgaacagatatttacaattacgatctcaccgcgcgatccagcgcacaaattctacctaaagctgaacaattaatcagataaatgaagtagttcaacggatttggttgtcctacctctgtgtgaaaacgggccttgcacgctgcaaggcccgagtttactggggttaggctaccttgacgttggcaataatgcccggtaaggtgcctttcgtgcgccagaagtgcatatacatataatcctgcaaaggcgctgtggcagtaagcagcccgttctccatagctgatatttattagccgtaggggagcgagtgcgtgctggcggctaacgggcgcgttgcgggaaaagtatattacgattcatttacctgtagacctgattatcatggacaaatttgacgctaatcgccgcaaactgctggcgttaggtggagcggcgctcggtgctgctgccattctgcctgcgccggcatttgccaccctctcgaccccccgaccgcgtattttgacgctgaacaacctgcataccggtgaatcactcaaggcggagtttttcgatggcagaggctatattcaggatgaattagcaagacttaatcattttttccgtgattatcgcgcgaataagattaagtccatcgatcccggtttgttcgatcaactctatcgtttgcagggattacttggtaccaacaagcctgtccagcttatttccggttatcgttctgttgataccaataatgagcttcgcgcgcgtagccggggtgtggcaaaacacagctaccacactaaaggccaggccatggattttcatattgaaggcatttcgttaagcaatgttcgcaaagccgcgttatctatgcgcacaggtggtgtaggatactacccacgtagcaactttgtgcatattgataccgggccagtacggcactggtaacgaaaggagcctcatgaactatcgtattattccggttaccgcgttcgcgcagaactgttctttaatctggtgtgaacaaaccaaactggcggcgctggtcgatcccggcggtgatgctgagcgaatcaaacaggaagtcgcggcggcaggcgttagcctgatgcagattctgctcacgcacggtcatctcgatcacgttggtgcggcggcggagctggcacaacattatggcgtgccgattattgggccggaaaaagaagatgagttctggctggaaggattaccggcgcagagccggatgttcggtctggaagattgccagccgctgcagccagatcgctggctgaacgaaggcgatacggtcagcgtggggaatatttccctgcaggtgctgcactgcccaggccatacgccggggcacgtgatcttcttcgatcctgcttcccgactgttgatttctggcgatgtgatttttaaaggcggagtagggcgtagcgacttccctcgcggcgaccatagccaactgatcgatgcgattaagcgcaagctgttgccgctaggcgatgacgtgtcgtttattccgggtcatggaccgatgtcgacccttggctatgagcgtctgcacaacccattcctgcaggatgaaatgccggtctggtgacctaaaccagcatataaaaaaggccgcacatgcggccttttgtttgccctgcgctgagattacagtacggcaacaatcgcttcgcacagcggcgccatgttgtcgggcgtcataccggcgacgtttatacgtccggacgccaccgcgtaaattccgaactcttcacgcagacgcagtacctgctctttggtcaggccgctgaacgagaacatcccgttttgctgaatgatgaaagagaaatcgcggctggcgcctttttcctgcagggtattaacgaaaagcagacgcatacgctggatgcgttgacgcatgtcggtcaactcttgctcccagatggcgcgcagtgcgtcattgctgagaatggtcgccactaccgaggcgccgtgagcgggcgggtttgagtagttcgcgcggataaccgacttcatctggctgaaagcgcggtctaccgcttcctggtcagcggcgaccagcgtacaggcgcccacgcgctcgttgtacaggccgaagtttttcgagtaggagctggcaaccagcagctctttatgcagagcggcgaaagcgcgcaggccttcagcatcttcttccaggccgcgggcaaagccctggtaggcaaagtcaaacagcggcagccagcctttctctacggagagctgcgccagctgttgccactgctccagcgtcggatcgataccggttgggttatggcagcagccgtggaacagaaccacgtcgccggcctgcgcttcggtcaggctggccagcagcccgtcgaagtcgagtttgtggttagcggcatcgtagtaggtatattcgcgaacttccagcccggctgaattgaacacgcttttatggttcggccagctggggttgctcacccaaatacgtttaacgtcggtgttcttcgccagaaaatcggcggcgacgcgcaggccacctgtaccgccgggcgtttgcgcggtgcgggcgcgtttatcattgataattgcgcttcctttcccgaacagaagctcctgggtgcagcggccaaattccggaataccatcgatacccagataatttttagtggtttcattttccagcagatactgctctgcttttttcacgctagtcaggaccggtgttttacccgtttcatctttataaacaccaattccaagattaatttttgttgggcggtcatcggcacgaaacagatcggccaggcccagaattgggtcggcaggggcggcggtaatgttctcaaacatgacgaggttccattgtgattactgaagggaaatccgctatcaggttaacgggagttatgttaattgccaaccgtttgcgacaaaaagcgagaaggtttttgaaagttacgatcttcctctcaggaaagcagaaaagcaggaccgaagtcctgctttttaggcatatcacgaaggggtgtactgcagattagaactggtaaacgatacccactgcggcctggtcgtcggtcgcaacgccagcggctttggtgtaatcgttgtcgttcagctggttgaatttatacgcagcgtagacgttcatgtttttgttgaagtagtaccaggtacccacttcgacgtatttaaccaggtcagcatcgccgccggagaagccagcgcgggagcgcaggtctttacctttagtctgtacgtagccgatggacggacgcaggccgaagtcgaactgatactgaacaacggcttcgaagttctgagttttgttagcgaagtagttgccttcgttttccggcgtcatgttgtaagtctgggagtacatgaccgcagcatagacgttgttcgcgtcatacttagcggaggttgcccatgcttcagctttttcgccctgacggtcagctttctgatcgccgctacggttggagttcgcatagcctgcagacagcgcaatgccgttgtcaaacgcgtaggttgccgcggtgctgaagccgtcgccgttttgtttcttaacatcacggctggaagcgtcgtttttaccctggtactgcagcgcgaagctcaggccgtcaaccagaccgaagaagtcagagttacggtaggtggctacgccgttggtacgcgcggtcatgaagttgtcggtgtagctccagccgtcgccgccccattcaaccagcatatcggttgccgcttcaacgtcgtagatggcgccgtagttacgaccgtagtcgaatgaaccgtattcaccggcttttaagcctgcgaaagccagacgagttttggtggtctgtttaccttcaacattggacgcatccatgttgtattcccactgaccgtagccgaccagctgatcgttgatctgggtttcgcctttcagaccgatacgggcgtaggtggtatcatcgctgctggtgtcgccgttggtggtccagacgtgctcgccaaccatttttccgtagaagtccagtttgttgccgtttttgttatagatttctgcagcgttagctgcaccggctaccagcagggcaggaattaccgctgccagaattttgcgcttcatcattatttattaccctcatttatatttttttatgaacacttgccactgccgtcaataagtttcgtcaataaaaatttacagaactattgatgatagtttggtgtctggaggcatctttccattcagaacaacgtttcgctagcctgaaaatgctaccaatatcgcatatgagtaacaaaaggaaattctatgtaactaaatatgtatttttgggaactttgtgaactcaatcaacattccgcccctgttcgccgattaaatcacctgtctttatatatctatatgaattaattatgattaatttagataagagagggtttgtgcattttacgtcagcattttgctttatttttattcaaatcttgtcgttgcaagttgtgctgtggctggttaaaaaacgagcaatataatcagcatgtttgccaatttatgaacataaggtgcggttttaattagcggtcgctaatgaaatagtgcgtaacataattgtgaatcaggatggttgatgtttaagtttcctgatattcgttaacgtaaattgacataaaaaaaggccagcttgcgctggccctggatgaaaattgcagaaaaaaatcagaaagtcgcgttacgcggggtccgcgggaacggaatgacgtcgcgaacgttctgcacgccggtcacgtaggcgataagacgctcaaagcccagaccgaaaccggagtgcggtacggtgccgtaacggcgcaggtcgcgataccaccagtagtcttctttattaagacccatttccgccatacgcgcgtcaagcacgtccagtcgctcttcacgctgggagccaccgataatttcaccgatgcccggcgccagaacgtccattgcggcgacggttttaccgtcttcgttaaggcgcatatagaacgccttgatgtctttcgggtagtttttcaccaccaccggagctttaaagtgctcttccgccagatagcgttcgtgctcggaggagagatccacgccccagtagaccgggttttcgaacgacttaccgcagttttccagaatggtgaccgcgtcagtgtaatcaacctgggcaaaatcagcggaaacgaaacgctgcaggcggtcaatagcgtctttatcaacgcgttcggcaaagaactgcatgtcgtctgcgcgctcttcgagaacggctttgaagacgtacttcagcatcgcttccgccagacctgccacatcgttcaggttagcaaaggcgacttccggctccagcatccagaactccgccaggtggcggctggtgttggagttttccgcacggaaggttgggccaaaggtgtagattttggacagcgcgcaggcgtaggtttcgccgttcagctggccggaaacggtcaggaacgactctttgccgaagaagtctttatcgaaatcgactttgccctgttcgttgcgcggcaggttttccagatccagcgttgacacgcggaacatctcgccggcgccttcagtgtcggaagcggtaatcagcggagtcgaaacccagaagaagccctgctcgtcgaagaaacggtgcagcgcctgcgccagggtatggcgaacgcgcgccaccgcgccaatcaggttggtgcgcgggcgcaggtgggcaacttcacgcaggtactcgatgctatggcgtttagccgccatcggataagtatccgggtcttccacccagccgctgacttccacgtggctggcctggatttcaaagctctggccctggccctgagatgccacgactttaccggtcaccacgaccgagcagccggtggtcaggcgcagcacttcctgattgtaattgggaagagaattactaataacggcctgtacaggatcaaagcaggaaccgtcatagacggcgaggaaagaaaagccagctttagaatctcggcgggtacgcacccatccgcgcacggtgacttcgctgtcaacggcaacgcggccctggagtacgtcggctacaggcacaacgctcataatagtctctcttgttagtccaatagaaaaatctgtattcccctgcaacagggggatatctatgttacctgtcatcttccatcagacaagtagatttcgcacaagaaaggggggttttaggaaataaataaggagatagcctactttgctgcgtgagagcctgatattcagagagattcgttcagcgcgatgatcccatgcagggcgaacggggttcttaatgcctgataacgtctcggggtgataagcggaggcgaataaaaatgcgcccgttttggcggacgcattttgtctttatatgacctagctggcttttttaaccggcggtagatcgaaggctttgcgcagcgcgcggacgaaagctttatcgtgacaaatcgttttacccgggctatccgaaagtttcgccaccggtttaccgttgcactccaccagcttgataacaatattgagcggcttcacctgaggaatatcgcaggttaaacgcgtgccgataccgaagctcagattcacccgcgatgagaagtggcgatagagatcaaccgcttttgtcaggttgagattatcggaaaataccagcactttgctcagcgggtcgatgcccagctttttgtagtgggcgatagccttctcgccccattccaccgggtcgccggagtcgtggcgcagcccctgatagcgggtcgcaaactccggcccgaaatcgcgcagaaaagcgtccatcgtaatgcagtcggtcagcgcaatccccagccgatcgggatactcttccagccaggcagcgagagccgcgcgctggctgctcgccaggttcgggctgatctgctgatgcgcctggaaccattcgtgagcctgggtccccattggggtcaaattcaaacgccgcgccagatcgtaattgctggtaccggtgaaccaggattcttgctgaagacgctgaacaatcgcctgctgcacctcgcgggagaagcggcggcgggtaccgaaatccatcaggcggaagcccgacatatcgatatcagcagtgaggcggttaaagtcagtcagcttatgctcaagggtgtccagcgcgagatcgacgctgatttccggcgagcgatagcgatgtaccagctcgcttatcaccgccagcagcggaacttcccacataataacttcaagccaggggccggaaaggcgaatattcagcttgccgttgtcattgatgaccgtgacctggcgcgggtcgtagcggaagccgcgtagccactcgagatagtctggcgcaaagaagggcaggctcgacaaccagtgatattcatcgtcctgcagtctcaggtcgcgcatcgtctcaacctgctcgcgaatcgcatcggcgtagatgccgagcagatcgtccccgcggcagcggaactccgccgcaacctgtacatcattgtagcggtggaagacagcctgctgcatgtgcagcttgtaggcatccgtatcaagcaacgagtgcagtacaggagaagtgaattgggtcatggtgcgcagtagcatcctctcactggagcgtttccatcaaaaccaaagcggtaaaaggaggcggagtatacctgtaatacccgacgctgtcccgcggtgacggctgatggcgacgctgacggtcatttgcgaggcctagtttaatatattgaacacgcatcacaccacaagctttgcgcctggtcgagcgcatttcgtgcctcttgtgttatcaaaatgtagcaattttcatgtttagcattgaaaagatgaagattctgcatagcgagatttgcgcaacaggaatagactgagtcgacactttacaggacacgctaaaggttttttatgacacaacagccccaagccaaataccgccacgactaccgtgagccggagtatctgattagcgatatcgatttgacctttgacctggatgccgcgaaaaccgttgtgacggctgagagcaaggtctcccgccacgcggctacgtctgatgtgccattgcgtctggatggcgaagacctgacgttggtctctctgcggattgatggtcagccgtggagcgactacaaggaagaaaataaccagctggtgattagcgggttgccggaacatttcactctgaccatcgtcaatgaaatcagcccggcggcgaataccgcgctggaagggctatatcagtccggcgaagcgctgtgtacccagtgcgaggcggaaggcttccgccacattacctggtatccggaccgcccggacgttctggcgcgcttcaccaccaaaatcatcgccgataaagcaaaatacccgtttctgctctccaacggtaaccgcgtggcccagggcgagctggaaaatggccgtcactggatccagtggcaggacccgttcccaaaaccgtgctacctgtttgcgctggtggccggtgattttgacgtcctgcgcgataccttcaaaacccgttcggggcgtgaagtggcgctggagctctacgttgaccgcggtaaccttgaccgcgcgccgtgggcgatgacctcgctgcaaaattccatgaagtgggacgaaacccgctttggtctcgagtacgacctcgacatctatatgattgtcgccgtcgacttcttcaacatgggcgccatggagaacaaaggccttaacgtctttaactccaaatacgtactggcgcgtaccgataccgcgaccgataaagattacctggatatcgagcgcgtgattggtcatgaatatttccataactggaccggcaatcgcgtgacctgccgcgactggttccagcttagcctgaaagaggggctgaccgttttccgcgatcaggaattcagctccgacctcggctcgcgcgcggtgaaccgcattaataacgtacgcaccatgcgcggcctgcagtttgccgaagacgccagcccgatggcgcatccgattcgcccggatagcgtgatcgagatgaacaacttctataccctgacggtgtatgagaagggagcggaagtgatccgcatgctgcataccctgctgggcgaagaaaatttccagaaaggcatgcagctctattttgagcgccacgacggcagcgccgcgacctgcgacgactttgtccaggcgatggaagacgcttccaacgtcgatctgtcccacttccgccgctggtatagccagtccggtacgccaattgtcaccgtccatgatgactacaacccggaaacggagcagtacacgctgaccatcagccagcgcacgccgccgaccgctgagcaggcggagaagctgccgctgcatattccgttcgacatcgagctgtacgataacgaaggcaaggtaatcccgctgcagaagggcggtcacccggtgcatcacgtgctgaacgtcacccaggcggagcagacttttgttttcgacaacgtttacttccagccggtcccggcgctgctttgcgagttttccgcgccggtgaagctggagtacaaatggagcgatcagcaactgaccttcctgatgcgccacgcgcggaatgatttctcccgctgggacgcggcgcagagcctgctggcgacctatatcaaactcaacgtcaaccgtcaccagcaggggcagccgctgtctctgccgattcacgtcgccgatgcgttccgcgcgattctgctggatgagaagatcgatccggcgctggcggcggagatcctgacgctgccttcagcgaatgaaatggcggagctgtttgcgattatcgatccgcttgccatcgcggcggtgcgcgaagcgctgacccgcacgctggcgaaagagctggctgacgagttcctggcggtttacaacgccaacaagctcgacggctaccgcgttgagcatgccgatatcggtaagcgttctctgcgtaatacctgcctgcgctacctggcgtttggcgataccgagctggcggataaactgattagcgcgcagtatcaccatgcggacaatatgaccgacgcgctggcggcgctggccgcggccgtagcggcccaactgccgtgccgcgatgcgctgatgcaggagtatgacgacaagtggcaccaggacggactggtcatggataaatggtttatcctgcagtccaccagcccggcggataacgtcctggagacggttcgcggcctgttgcatcatcgctcgtttagcatgggtaacccgaaccgcgtccgttctctgatcggcgcctttgccggcagcaacccggcggcgttccatgcagaagacggcagcggctatcagttcctggtcgagatgctgactgagctgaacagccgcaacccgcaggtggcttcgcgtctgattgagccgctgattcgtctgaaacgctatgacgagaaacgtcaggcgctgatgcgcggggcgctggagcagctgaagggtctggagaatctttccggggatctgttcgagaaaatcagtaaagcgctggcgtaacgccagcgcgagtccaaacctgtagccccgctaagcgcagcgcgagcgggggaacgtcgcagtcgttaaccgtggctcactaagcgtggcgaggatttgttcttgccgcgctgcatcacccgattcagtacttccgcttccagttcggccagcttcactgaacccgtgcgtcgcggacggggaatgtccaccagcagatccagccctatcttcccctcttcaatcagcaaaacgcgatcggccatcgccaccgcctcgctgacgtcgtgggtgaccagcagaacggtaaatccgtgctcctgccacagcgagacaatcagatcctgcatctccaggcgagtgagggcgtccagcgcgcccagcggctcatcaagcagtaataatccggggcgatgaattaacgcgcgagccagcgccacgcgctgcttttgcccgccggaaagcgccgcgggccactcaccggcgcggtcttcaaggccgacgctcgccagcgccttgagcgccgcctcgcgccactgccccttcagcccgaggccgacattgtcgatcaccgttttccacggcagcaggcgggaatcctggaacatcatccgggtatcctcctggatttgcgccagcggcgtcgaacccgccagcagctgcccggcgttgggtttttccagcccggccagcagccgcagcagggtgcttttaccgccgccgctgcgtccgaccaccgcgacaaattgcccggtgggaatatgcagatcgagttcattcagaatcgtcttgctgccgtaacgcttgcttacgccgtttagcagcagcgggatccccggattaagacgcgcggttgtcatgcgttggcctcctgaaggtggtaagccggattccagcgcagccagacgcgttcaagaagctgtgcgctgaagtcggccagtttgccgagaatagcgtaaagaataatggcgacgaccacgacatcggtctgcagaaattcgcgggcgttcatcgccagatagccgataccggcgttagccgagatggtttcagccacgatcagcgttaaccacatcaggccgagcgcaaaccggatgccgaccataatggagggcagggcgcccggcaggatcacgtgacggaacagagcaaaacccgataagccatagctgcgggccatctccaccagacccctgtcaatgtttcgaataccgtgccaggtgttgatataaatcgggaacatcgtccccagcgccacgaggaaaattttggcgctttcatcgatgccgaaccataaaatcaccagcggaatcagcgcgaggtgcggcacgttgcgcagcatctgaatcgaggtgtccagcaggcgttcgccccagcgcgacaggccgctgataagcccgagaaccaggccaatggaaccgccgatgctgaaaccaataagcgcccgccatgagctgatggccagatgttgccaaagctcaccgctggcggagagcgtccagaaggctttgagcaccccttccggtgacggcaaaatacgggtagagagccaaccaacggaagaggcgaattgccatacaatcacgctgccaaccggcaaaagccagggggctatgcggatcaggagtttttgcgaaagcgtcgccatacagtgttcctttattctttagcgttttgcctggtgacgggcatcaacgctgaactttaaacgtgctcaacccgctgtaaggttttcagcgccggcgcgcggctgctggggcgatgcagcgcctgccagaaggtttccagcgcctggtcgaggcggccctgcagattcggggtaaactgcggtttatgctgataatccgtgacctggctatcgtcagcgaaaacgccgtggaggatctcctgggctttcagcgcgttgagtaccggttttaaggcgtaatccaccgccagcatatgggcgatggttccgccggtagccagcggcagaacgattttgccctccagcgcgcgctccggcagcaggtccagaagcgtctttaacgcgccggaaaaagaggccttatagacgggcgtcgcgatgatcagcccatcggcgccggcaagctgttcatttaacgcatggagggctgggttatcaaagcgagcgtagagcaggtcttccggagcgaaattctgcagatgccagtggcagacctcgatatccgccgcagagagcgtctctctggcgtattccagaagcgcgctggagcgggaagggtagcgcgggctgcccgcaagtgtgatgactcgcatactctctccttataactaaatatttgcatttatctataattgataacatttagccgtagtgtgacagagcgcttttatttccctaaatgatttatccggcgttggattgtcagaaagtgcataacgagcgggagaaaagtaaacgtttgcgtcggaggtaagattttttgtcgtaggtcaattccctttccggggtggatcgcacataatacgcccccggtttgcacaccgggaatccaggagagttcatgtactaccccttcgttcgtaaagccctttttcagctcgatcctgagcgcgctcatgaagtcacttttcaacaattacgccgtgtttcgggtaccccgctggaaatgttggttcgccagaaggtgccgacaaagccggtaacctgtatggggctcacatttaagaacccgctgggcctggccgccgggctggataaaaacggcgagtgcattgatgcgctcggggcgatgggttttggttccattgaaattggtaccgtgacgccgcgtccacagccgggcaacgataagccaaggatcttccgcctggtcgatgccgaaggtttgatcaaccgcatgggctttaataaccacggtgttgataacctcgtggagaacgtaaaaaaggcgcattttgacggcattctgggtattaatattggcaagaataaagatacaccggtagaacaaggcaaagatgattatctgatttgtatggaaaaaatctatgcttatgccggctatatcgccattaatatctcctcgccgaataccccaggcttgcgtactttacaatacggggatgcgctggacgatttgctttctggtattaaaaataagcaacgcgagctacaagagaaacatcaaaaatatgttcctgtggccgtaaagatcgctccggatctttccgtcgaagaattgatccaggtagcggacagtttagtccggcataatatagatggcgtcattgccaccaataccactctggatcgatcgctggtacaggggatgaaacattgtgatgaaaccggtggccttagcggacgtccattgcagctgaagagtacggaaattatccgcatgctgtctgcggaattaaatggccgcctgccaattatcggagtcggcggtattgactcggtgattgccgcccgggaaaagatagccgccggagcgacgctggtgcagatttattccggatttatttttaaaggcccgccgctgattaaagaaattgttacccatatctaatcttttcccccctctgatactcctccagggctttatttatagccctggttgttttatattccttcattgttgcttatttagacattttagtcttttcttaatttttgaaatattctgtagcagtttacctgtttattacagacggaagtggaagaggacgggggtagaaatgcggatcaaacctgacgataactggcgctggtattacgatgaagagcatgaccgcatgatgctcgatctggctaatggtatgttattcagatcgcgctttgctcgccgcatgttgacgcccgacgccttcgcgccttccggattttgcgttgatgacgcagcgctctatttttcatttgaagaaaagtgccgcgatctcgaattatcaaaagaacagcgcgctgaattagtactcaatgcgctggttgcgattcgttttctcaagccgcaaatgccgaaaagctggcatttcaacacgcatgaagagagctggcagccaggcgttggcgatgccgccagcgcatggctcagcgataccggccagcaggtgaatctgctggtggttgagcccggagaaaacgccgcgctgtgcctgttagcccagcccggtctgacgcttgccgggcgggtgatgcagctcggcgacgtgattaaaattatgaacgacaggctgcagccggcgccaggcgtcgccagctacagcctgggtcaggcggtttaaggcgccagcctcaccgcggttttcggcacgcagctacagcataaaatggtgccatctgcggcgaccgcgtttttcttcagcgcgctgacttctccttcttccagccggatgcggcagctgccgcaaatcccagcccggcaggagtaaggaatacgaattccctgttgttccagctgctccagcaagatttgctgattattaccggtaaaactcactccctgccacgctatttccaccgtcgcgttctcctgcgcttcaggtgccggcgtagtatcactctcgcctgcgccgtaggccttcgccgggccgctggccagcacttctaacgcatcgcccacgcggattacgccgctatttcgcgcgatcaggttctggccaaaatcgacatcgccgttatccagcgccgtgcggaaacgctgcagcgtgcttaagggctccccggaaggatgcttttgcccgcgctccgggctgacggtggtcaatacgcagcggctgcacggtttgacgacatcaaaaatgacctcgccaatgcgcaccactttccacgtatcttcttcccaggcggccgcgccggtcaccagcagatttgggcgaaattgttctatgcttacgctggccggacagcgattttgcagatcgcgcagcgaggcctcattggccagcagatagggaaaaccgtcggcaaaagagagggggacggcatcgtgacgttttaccctgcggctaagcgctggccccagccagcggagctgaacgctgcggttgaagaacccgcttagccactggttcacccggtccggggcaatcagggcggtaaaatggttgccccagacttcggtcggctcctgctgtatggagaaatcgctgaagcgcaccatcgcgctgctgccgtccggcgcggtcagatgcagaccatcatggagcggcgcgggaataaatttgaccatttgcggaaactggcgggcggtaatgaaggtgccatcggtttccgtcaccataaatatacgatcgaaggccagcccgctgctgtctgcataagcgtggctcaggccaattccccgcatcgatttgacgggatgaataaaaagtcgcgaaagggttaccatacgctgcccctggctttaaaaataagcctttaactttatgacatggggcgcatattggctataatgcgcaccaattttcttttagtaaaagtgacgatatgaattctctgtttgccagtacggctcgtgggctggaagagctgttaaaaactgaactggaagggctgggcgcggtggactgccagttggtccagggcggggtccattttcagggagatacgcggctgctgtatcaaagcctgatgtggagccggctggcttcgcggattatgctgccgctggggcagtgcagcgtatacagcgacctggatctgtaccttggcgtacaggccattccatggaccgagattttcactcaggatgccacttttgccgtgcactttagcgggctgaacgaagagatccgcaacagccagtacggggcgttgaaggtgaaagacgccatcgtcgacagctttacgcgtaagaatctgccgcgtcccaacgtcgatcgcgaaaatcccgatctgcgtattaacgtctggctgaataaagagaccgcgcatatctccctggatcttagcggcgaggggctgcacctgcgcggctaccgcgacggtaccggtatggcgccaatcaaagaaaacctggctgcggcgatagtgatgcgttccggctgggctgccggtacgccgctgctcgatcccatgtgcggttccggtacgctgctcattgaagcggcgatgctcgctaccgatcgtgcgccgggtttacaccgcggccattggggtttcggcggctgggcgcagcatgacgatgctatctggaaagaggtgaagtccgaagcgcaaacccgcgcccgtcaggggctggcggcgtatgagtcgcgcttttacggttccgacgttgacgctcgcgtcatcgaacgcgcgcagcgcaacgcccgccgcgccggtattggcgaactgattaccttcgaagtgaaagatgttgcccagcttagcaacccactgccgaagggcccttacggcacggtgataagcaacccgccgtacggcgagcgtctggagagtgaaccggcgctgattgccctgcatagcctgctggggcggatcatgaaaaatcagtttggcggctggaacctgtcgctgtttagcgcctcgccggatctgctgagctgcctgcagctgcgcgctgataagcagttcaaagcgaaaaatggaccgctcgactgcgtccagaagaactatcatcttgcggaaaacgaaggcggcaaaaccgcgatgctggcggaagatttcgccaaccgtctgcgtaagaacctgaaaaaatatgagaagtgggcgcgtcaggaaggcattgaatgctatcgcctgtatgatgccgacctcccggagtacaacgtcgctatcgaccgctacgccgattgggtggtggtgcaggagtatgcgccgccgaaaaccgttgacgcgcacaaggcccgccagcgcctgtttgatattatcgccgccaccattgccgtactggggattgcgccgaacaagctggtgctgaaaacccgcgaacggcagaaagggaaaaaccagtatcagaaaatgggtgaaaaaggtgagttcattgaggtgcaggagtataacgcacgtctgtgggtaaacctgaccgactacctggataccgggctgttcctcgaccaccgtattgctcgccgcatgctgggccagatgagcaaaggcaaagatttcctcaaccttttctcctacaccggtagcgccagcgtccacgccggccttggcggcgcgcgttccacgacgacggtcgatatgtcacgtacctatcttgaatgggctgaacgtaacctgcgcctcaatggcttaaccggccgcgcgcatcgcctgatgcaggctgatgtgctgggctggctgcgggagaccaccgaacagtttgatctgatctttatcgatccgccaaccttctccaactcaaagcgtatggatgatgcgtttgacgtacagcgcgatcatttgcgcctgatgaccgatttaaaacgtctgctgcgtaaaggcggcacgattatgttctcgaacaacaaacgcggtttccgtatggatcatgacgggctggcgcagctgggcctgaaggcgcaggagatcacgcaaaaaacgctgtctcaggattttgcccgcaaccgtcagattcacaactgctggctgattaccgcagcctgaaaggaataaagaatgtctttaattagtatgcacggcgcctggctctctttcagcgatgcgccgctgctggataatgctgaactgcatatcgaagataacgaacgcgtctgcctggtagggcgcaacggtgcgggtaaatcgaccctgatgaagatcctcaatcgtgaacagggtcttgatgacgggcgcattatctatgaactggatctggttgtggcgcgtctacagcaggatccgccgcgtaacgtgaccggaaccgtatatgactttgtggcggaaggtattgctgaacaagcggcatacctcaagggttatcacgatgtttcgcagctggtgatgaccgacccgagcgacaagaatctgaacgaactggcacgccttcaggaacagctggataatttagggctgtggcagctcgatagccgcattaatgaagtgctggaacagctgaatctggatcctaacgccgagctttcctcgctgtccggcggctggctacgtaaagcggccctcggccgcgcgctggtcagcgggccgcgcgtgctgctgctcgatgaaccgaccaaccatctcgatattgaaactatcgactggctggaaggtttcctgaagatgttcaaaggcaccattatttttatttcgcatgaccgttcctttattcgcaacatggcgacgcgaattgtcgatctcgatcgcggtaagctggtgacctatccggggaactacgatcagtatctgctggataaagaagaagcgctgcgcgtggaagagttacagaacgcggagtttgatcgcaagctggcgcaggaagaagtgtggatccgtcaggggatcaaagcgcgtcgcacccgtaacgaagggcgcgtgcgggcgttgaaagccatgcgccgcgagcgcggtgagcgccgtgaagtgatgggcagcgcgaagatgcaggtggaagaggccgcgcgttcgggcaagattgtgttcgaaatggagaacgtcaactaccaggttgatggcaaggtgctggttaaagacttcaccgctcaaatccagcgcggcgacaaaattgcgctgattggcccgaacggctgcggcaaaactacgctgctgaagctgatgctcggtcagctgcaggcggatagtggacgtattcatgtgggtaccaagctggaagtggcttacttcgaccagcaccgcgcggaacttgatccggataaaacggtgatggacaacctcgcggaaggtaaacaggaagtgatggtgaacggcaagccgcgccacgtcctgggctatctgcaggactttatgttccatccgaaacgcgcgatgacgccggtgcgggcactgtcgggcggggagcgtaaccgcctgctgctggcgcgcctgttcctcaagcccagcaacctgttgatactcgatgaaccgacaaacgatctggatgtcgaaaccctggagctgctggaagagcttgtcgacggttatcagggaaccgtgatgctggttagccacgaccgtcagtttgtggataacacggtaacggagtgttggatcttcgaaggcgcggggcaaattggccaatacgtgggcggctatcatgacgcacgcggtcagcaggcgcagtatctggcgaaaaaacagccggtttctaaaaagacagttgaagttgctcaaccgaaagcagaaagtgtcaaacgcgctgccagcaaactaagctataacctgcagcgcgagctggaacagctgccgcaaaaactggaagaactggaagcccagctgcagaatttgcaggagcaggttgccgacccttctttctttggtcagtcgcatgaccatacgcagcaggtgctcgcacagctgagtgaagcggagcaggcgctggaaaccgccttcgaacgctgggaatatctcgaaggtttaaaaaacggcgcataagctgaggagttttcatgtgcgatcatcatcatgctgcgcggcatatcctgtgtcgacaatgtgatctgctggtggctttgccgcagctggagcatcgccagaaagctacgtgtccgcgttgcggaacgacattgacaacgtcatgggacgcgccccggcagcgtcccacagcctacgcgctggtcgcgttgttcatgctgctgctggccaatctgttccccttcatctatatgaaggttggggggatcagcagtgaaatcgagctgctggaaattccgaacgtgctgtttagcgaggattacgccagcctcggtaccttctttttacttttcgtccagctggtgccggctttctgcctggtcaccatactgctgctggtcaatcgggtgagcatgccttccgggctaaaggcgtttctggcgcggatcctgtttcaccttaaaacctgggggatggcggaaatctttctcgccggggtgctggtcagcttcgttaagctgatggcctacggcgatatcggcatcggcctgagcttcgttccctggtgtatgttctgcctgttacagctgaggacgttccagtgcgtggatcgccgctggttatgggatgatattgcaccaatgccggcgattacacagccgctgaaagtcggcgtctccggcctgcgtcaggggctacgctcgtgctcatgctgcacggcggttttgcccgtcgatgaggccgtttgtccgcgctgtcggacaaggggaaccgcccggcgtaaaaacagcctgcagtggacgctggcgctgttggtgacttcgctgatcctctatatgcccgccaatattctgccgatcatgattaccgacctgctgggcgataaaatgccttccacgattatggcgggggtgatcctgctatggagcgaaggatcgtatccggtggcgatggtgatctttattgccagtattatggtgccgacgttaaaaatgatcgccattggctggctatgctggaacgccagcggcaagggagcgcgcgactcggagcgcatgcatctgatttatgaagtcgtcgagtttgttggccgctggtcaatgattgatgtgtttgttatcgcagtcctctccgctctggtacgcatcggtggattaatgaatatctatccggcgataggagcagtgatgtttgcgctggtcgtagtaatgacaatgttttcggccatgacctttgacccgcgtttattgtgggatcgtgagccagattcaagccatgaggaaagactgcagcatggaaaataagagcggagaagcgaaagtgcaaaaggtgaagaactggtcaccggtgtggatcttcccgatagtcacggcgctgattggcgcatggattctcttttatcactatagccaccaggggccggaagtgaccctgataaccactaacgcagaaggtattgaagggggcaaaacccggataaaaagtcgcagcgttgacgtcggcgtgattgaaagcgcgacgctcacggacgacctgacccacgtggagattaaagcgcggctgaattcaggtatggaaaaactgctgcaccaggattcggttttttgggtggttaaaccgcaggtcggccgtgaaggaattagcggtctgggaacgctgttatccggcgcctatatcgaactgcagccgggtagcaaaggctctgttcctgcgcagtatccgctgctggattcaccgccgctggcctcccctgatgctaaaggtattcgcatcctgctggaaagcagcaaagcggggcagctttcacccggcgatccggtgcttttccgcggctaccgcgtaggttcagttgaaaccagcaccttcgatgcgcaaaaacgcaatattacctatcagctgtttattagcgcgcctaacgatcggctggtcaccaataacgtgcgcttctggaaagatagcggtattgcggtggatctgactgctgcgggtatgcgcgttgagatgggatcgctgtcgacgctgtttggcggcggcgtcagctttgatattcccgaagggctaccgttaggtgagccggtggcgaataaaacagaatatcatctgtttgacgatcaacgcagcatccaggattcggtgtttacccagcatattgactacgtgatgttctttaaagattcgattcgcggtttgcagcccggcgcgccggttgaattccgcggtatccgtctggggaccgtcggcaaggtgccgttctttattccaggcctgaagcagaacatcaacgacgattaccgtatcccggtagaagtgcgaattgagccggaacgtctgatcaatcagttaggcgccgatcctgacattcgtaagcatatcgatgatctaatgaatcgcgggctgcgcggttcgcttaaaaccggaaacctggtgaccggtgcgctgtatatcgatctcgacttctacccgaaagcccctccgcgcggcaagatgcaggagtttggcggttatccgattattccaaccgtgagcggtggtctggcgcagatccagcagcgcctgatggacgcgctggataaaattaacaatctgccaattaacccgctgctggagcaggcaaccagtacgctggcgcaaagtgaaaaaacgatgcagcacgtgcaggcgacgctggacagtctgaacaagataacgtcaagtcagtcgatgcagcagctaccgggcgatatgcagaatacgttgcgcgagcttaatcgtagtatgcagggcttccagccgggatctgcggcatacaataagatggttgcggatatgcagcgtctcgatcaggttcttcgtgaactgcagccggtactgaaaacgctcaatgataagagcaatgcgctggtatttgaggcgaaggataaaaaagatccgcagccgaagggagcgaaataatgaagaaatggctaatagcggcggcggtatgcgcgctgacggcatgcagcagcggcggtgagagtaaaacttactatcagcttcccgtggcgcagggtggcgcgcaaagcgccacccaccaaagcaaaaacttgctttgggtcgagcaggtgagcattccggattatcttgccggtaacggggtggtctatcagaccaccgatgttcagtatgtgattgcgaataacaatctgtgggcgagcccgctcgatcaacagctgaaaacgacgctggtggcgaaccttagcaaccagcttccgggttgggtggttgcctctcaaccgctgggtagcgagcaggatacgctgaacgtgtccgtcagcggttttcatggccgttacgatggccgggtcatcgtcagcggcgagtggctgctgaagcatcaggggcagttgattaagcggccgttccatattgagcttaagcaacaagaggatggctacgacgcgatggtgaaaacgctcgctcaggcctggacccaggaagcgacggcgattgccagcgagattaaccgcttgccataagtaaaattaataagaataaaagccgctgcaacagtgaaaatcgcagcggcttttttatttgtctcatcagtttgttacttgtgctggttcacagtttttgtacaaacgaagtttcatgtagctcacaaatatgacaatggcgtgaattttgcgcattgacgctatccctgattcgcggtattcgttaaccgtggtagcgtatttagtgaccattgttttcttttccaccagatcaaagtatgagggaaacgaggcatgaagagacaaaaacgagatcgcctggaacgggcacatcagcgtgggtaccaggccggtattaccggaaggtcgaaggaaatgtgtccttaccagaccttaaaccaaaggtcttattggctaggaggctggcgagaggccatggaggacagggtacaaattgcctgactgtctctttaaaaagaagcctccgctgcgcgggggcttcgccttttctaacgcgtgatgtttatcagaacgcggaagtgtcctggaacaggcccactttcagatcggttgcggtgtaaatcaaacgaccgtcaaccagcacttctccatccgccagccccataatcaaacgacggtttatcacgcgtttgaaatgaatacggtaggtcactttcttcgccgttggcagtatctgaccggtgagcttcacttcgcccacgcctaatgcacgtcctttaccttcgccgcctaaccagcccaggtagaagccaaccagctgccacatggcatccaggcccagacagcccggcatcaccgggtcaccaatgaaatggcaaccgaagaaccacaggtccgggttaatatcgagttctgcctcaacataacctttgtcatagttaccaccggtttcggtcattttgatgacgcggtccatcatcagcatacttggcgccggcagctgtgggcctttggcgccaaagagttcaccacgaccagaggcaagaaggtcttcttttgtataggattcgcgtttatctaccatgttttcagtaagccttattttgagttcgggacgcaggatagctaacacgtgtacgctgaacaagtccgatcagttcgaacctgaaccgcctaaccagcgtagcggccacggaaagcgatgacgactctcttgctgtgtcgcctgcgcaattctttcctgaatagtttgccgtaacgtttgtccttctccgtcccagagtagctgggtcagaatgggcagcgcttccgtcacgtcatcgactgcccagataaagaactgctcatccgcaacggcctgttgcagttcctgcgccaggctcaggtgacgaacgttggcggagggaatgatgactccctgtttaccggtcagcccacgctgctggcaaatagcaaagaagccctcaattttctcgttaagcccgccaaccggctgtacgcgaccaaactgatcgacagaaccggtaatggcgatgctctgattaatcggcacattggccagcgagctgatcagtgcgcacagttcggccatggaggcgctatcgccatccacttcgctgtaggactgctcgaaggtcagagaggcggtgaaggggagctgttgttcgagctccagctcggacatcagaaacgcctgcatgatcatcatgccttttgcatgaatgttgccaccgagctcggccttacgctcaacgtcaataaattcgccgtcgccgatatgtacgacgcagctaatacgtgaaggctcgccaaacgcacgcggatggcccggaaactcaatgacggagagtgcgttgatttgtccgacgcattcgccttcggtctcgatcaggatttgctcctgcagtatttcatcctggatgcgttcagcaaggtagccttcgcgccacaaacgacgctccagcatggtttgcatctcttcagcgctaatctcttcaccttcacagaacgcggcggcttcgcgaagctggcgagcaatccagagcacgcacagcggcaaggtttcctggtcgcctgtataacgcgcaccttcctggatcagcagcggccaggcgttagctgacagccccgggagttcgagcagttgagcattttgccagacccactggcaccactgcttcagcgtatcggcatcagcgatttgcagattatcttcatattcgctgtagatagcctgcgcagaaagctcgggttccatctcctgaaaatcagcaagagattcccgctcgccgaccaggataactttcaaactcaggggcatagagggaatgctgaccggaagagggcgagactcatcgaatgataaccagtcaaaacgctggcgggttaccatatttttcagccgcatccacagcaggggctgtgccagtaatgcacggagggagagaattaataccccgccgttagcgcgatggaccagaccgggttgtaacgtgatttcaccattaaactggcgcacgcagccaaaaagctgctctgcttcgatccagtccgcggcttcaaccggcgcaacgctggcgaaattatcttcagtcgtttgcgcaggggagagcgagatttttccgccatcaacctgatagcgaacgccacagagcgtttgtgccggttggtgtaaagtacgggtttcgttagccagccactgcaggtactccggctcttccggaattttaaccagcataaacggcgaaatggctggagtgaccaggagctgctccaggccatagaagagtcggggttgcagttcgcctgagagggatgcctctgcgtgagctaagtcggcttgtgcaaacagcgcctgataactttccgtatcaggagcgaggtcgtttcgggtaagtttcgtaatggtcaaagtcgctgttttttagtcagatgtaaaacgcgcgattatacattatgcggcgtccgagcacacgagggattgcggttgtcgcggtgataacgaatctaccaacatcacgaaagatcatttattctcagcacatcaggaaaaaactgatatcctgaaatgagttacacggtcacattgagatcgcaatgaaatatcaacaactggaaaatcttgaaagcggctggaaatggacttatctggtaaaaaagcaccgggaaggtgagcttattacccgctacattgaagccagcgcagcgcaagccgccgtcgatttattactgacgctcgaaaatgaacccgtgctggtgaatacctggattgagcagcatatcaatccggcgctggtgaaccgcatgaagcagactatccgcgcccgacgtaagcgtcattttaacgcggagcatcagcatacgcgtaaaaagtctatcgacctggagttcatggtctggcagcgtctggcaggtctggcgcaaagacggggtaaaacgctgtctgaaaccattgtgcagttgattgaggatgctgagcataaagagaagtatgccagcaagatgtccagcctgaagcatgatttgcaggtactgttaggtaaagagtagcgatgcaagcatcgggatatatcggtgcgctgctgctttttgatagcggaatttaaggtaaaaaaaaccccgcatcgcggggttttttattaacgagataacttaagcctgcggctgagttacaacgtctttgtagcctttaacttcgatttctacgcgacggtccggcgccaggcagtcgatcagagctgcgcgagctttcacgttgtcacaggtgttgccagtaaccgggttggattcgcccataccgcgagcagagattttgctagccgggatacctttggataccaggtaatcaacaacggactgagcacgtttctcagacagctgctggttgtaggcatcagaaccgatacggtcggtgtagcccagaacaactgcggaaccgtctttcggatccatgttgctcagctgggtgtacagctgatccagagcctgctggccttctggtttcagagtagatttgttgaagttgaacagaacgtcagacttcagggtgaagtgcttggtagtcacttctggagccggagccggcgccggagctacaaccggagcaacgtcgtcctgaccgaagcggtaggatacgcccaggctcagcatgccgttatcaggacgggtaccaacggtgccagcgtcgccgatgttgttaacccactggtattccagacgggttgcgatgtcacgagtaacagcccactctaagccgcccgcgaataccggggagacgccagtgtcgtgttcgctacgggaaacgccagtagaagcgtagttacctttggagtcagcgcgccaaaccataccacctagacgggtatagatatccagatcgtcagtgatcgggtaacccagtttagcagtcagctgaacgccctgagctttgaaagcgccgttgtcaacgctgcctttgtaagccatacggcccagccagtcgtaacccatttcaaaaccgaggtacgggttaacctggtaaccaccaaacgcaccagcacccagctgatcgttacgggtcgggccgttgttgccctggaaaccgttaccgtagaaaccggtgtcgtgatactgggaccagcccagtttagcacctgcgtaccaggtgttatctttcggagcggcctgcgctacggtagcgaagccagccagtgccactgcaatcgcgatagctgtctttttcattttttgcgcctcattatcatccaaaattcgccatgaaggttcagaagacctcacggttaaatccttcacccggggcgtgacttgttgttaactatgctgatacatgcagcgtaagccgatcacccctggcgatgtaaagtctacaacttagttcgaaacttacaagtgtgaactccgtcaggcatatgaaaaaaaagggttgtgtacgctatgtttaacaaatacggttgaacttaatcgaggcaaaaaaagtcgcgaagccgcatcagacaagcattttaacaaaaatgccgttccagaaagcccatttcacgccagggcaaaaaaaattccaggattaatcctaaactcggttaatgatacaggtttgagtgaatttttagcccagaaagttgtctgccaggctgagcggtatttcttaccgggcgcatgataaagcccatcgcgtgaccctcttctgcagcggcaaccaggcgttcatgttcctcaatgctcagttcttctgatagccagccaataacgacgctataatttccggtgcgcagtgagcgaaccatggattccagggtgttagcgggggagagctggctgatctgcatcaccttcgacagcggcaaaccggacgactgcacccattcgcggctcagcttctgttgtggcgtcagccagagctgccagcgcgattgctggccaagctgttgtaataaaggaagcaatagcagctgcgtcatcatgggctggtcttctcgatagactatttcactgatcagcccattagctggctgttcggcagcgtcatgagagagacgacgtactgaagtagaagtcagtggtgaacgatttgcgtgagctgatgtaaacatagtctatcccgcctgtgggttactgtatgcatatacagtatatgcggccgggtgaaagatcaaccctattttctctgttgctggatgaaatttgtacgtcaccgggagtgaacccgaaccggtcgcatcggatgtccgcgcgtacacaatgtgaattcatggttgtcgcgctttcttgctggctaaattcttctcataaatgatggcattaacgctctatgagcgaacagggatgccctgctctctgtatgctactgtgatgaatattaattaagcattttatctttcccggatttaacttcatcaaaagactattttctgaaagcggctcgcaaaaaaacacgccgattaaaatgaatagataattcatgttgccgcatgaagggaagtcacttattttctcttttaacggatccgttagcacatttatgtcttatttacatgattaacaaaggaataatcatgaagaaagttatatgtcttaggatccatcagtttcgggcatgtttgtctccattaggaaaaataagctgtcggcccttatttggtggctatagcctggcgatagataataccgtgtttgccatgatggctgagggggaaatctatcttcgggtttgcgagcagagcgcggagtaccgcgtggcgcataaaaacccgctgttgaagatgcagaagaatggtcgtctggtcgcgctgaagtattatcatatagatgaggaactttggcgcgatagcaaaatgctttttcatttatcggcgctgtcattacagagcgcgcgtcatgaaaaacatcggcagcgacattccggaagattaaaaaatttgccaaatatcagttttcatatggagctacagttgattaattcaggcattacggatgaattaatgctgcgtaagattggggccaaagaagcctggttgaggttacgaaaaataaataaagcgctaacggtgaatattctttattccttacagggggctattgaaggcgtccatgcggccacgctcccgacgcagcagcgtcaggagcttgagacgtgggcaacggaacaaatgcgggagagtgagagctattcgggttgaatctcaacctgttgctgtagccggcaaatctctggcagcagcgccagtagcagcccgatttgttgaagcactaacggctctttgctatcggcacgagggtcaagatgctgtatccgggtttgcaggcttgttaacgcttgctgtacccgctgttcatcggccggtgagtggtgcagcgcgtcatcaacataacaaacggcatcgtccagcagcgccaggatatctggcgttgtcagcttttccctgtgcgcgcccagggcggagatatagctggtaaaagtgtggttcaggcataacaaccgaaaagcggtttcccgcatttgcgagcccgctctgggttccgttgataagtttgatacaacggatgccagctcaccgtccctgctgtgcgccgctcttcgcgcaatacgataggcaagacggttgtcgcgcccctgatgatattgctcgagtatggcatctaaatatcggcagttggcattgattgcttgttcaagtactcggggcaggttgcggaacttccagtctggccaaataaagctgactgcggcccaggcgatagcgcagccgatcagcgtatcaaatatacgcggtagggcgacttcgaaaccttcccccaggaggttaaagcacagcaaaaccaggagggtaatgaacatggtcgcatgggcgtactgcacattacggaatgcgaagaacagcacgccggtcaggacaattaaaagcagctggccttcgacggaagggacgagaagcagtaccggcaggccaatcgctacgccgatgagcgtaccgattatccttagcgccagccggtgacgagtggcgttatagtttggctggcatacgaacaggctggtcagcaatatccagtaaccgtggtttagtccggttaactggataaatgcataacctgcgcacaggactaatgacattcggaccgcatggcgaaacagagctgactctggggtcatattattgcgcaggcgcagccagatatcgctgaaactgccaggttgatcgtcggctaacaggttttccgtattgtgactggactgtacagtcgtctggacggattcaattgtcgccagctgggcgtcaatggcgcgtaagttattaagcaaaaatcccaacgccttaatctgttctgccggcgcgccgctggcttttacgcgatcgagcgcggcgtcaagatgcataaaagcgcgctcaaagtgagtatcatgaaggtagggttcgcgtagcaggatagaacgagacagtttctggcaggcctgcgcctgcattgacagcatacgctggaagcggaacatcacgtcactgtagcgaaaatgatcgcgcagcgtttggtattgaatatgcgatgagcttgcgcgttcgtggatgtcctgcgccacgaagtaatattgcaaggtgcgacgcgttccgcgctgcccgcgatcgccgcgcaggcgagtcagcagggaaactttggtctgattcagcgtggccacaagctggccattggctatcgccaggtcatacagcggagcctggctttcatcttcaatatccggatcgaacaggcgcgatttaagctccagatagcgagctaactgctcgtagctgcgtgccagattgtcctgaagagggcggatagggaaaatcagatgtccggagagggtaagtaagttgtaccacaccgcgccagccagcaaaaacagcggctgaagataccagtggctgtaaagcgtaacgcccagcatggtatagatggcgattaacaaagcaccaaaggcgatggtggcatagcgttggcccaggccgccgagcaaaataaaaccgattgttgaaacggttaatcccgccgcaaataaccacggccagggaaaaaggagttccactgaggctgaagcaataaaaaagcacacgagggtaatggccagattacgcagacgtcctgtcaggcggtcatcaaggtcggtcagcgccgctgccaccaccccgagtgttagaggaatcgtgagttttacttcgccaagccaccagggaaatgcggtcgtgccgcagagtgcgataaatatcctgatgttatataaccaggcactgttccatgtatagcggcgtagcaggggggtgagcatttctctattccattcaattactgaaagcggcgacgcgcattggcttcacgcgcggcgcgagcggtctcgacggagacgactcgtcggcctactggccataaagcaatagcggcgattttaaaattggcgatgccaaccgggatgccaatgatagtcaggcattgggcgataccacaaaagatatgcatcagacacagccaccagccaaagaaaataaaccataaaatattcaatagtgtcccacccgcgtttagcaggctattctttccctgaggatcgagttcgtcgacatgaacggcctcattcccatagggaaaaagagagagttttgttatctcccagcaggagcgggtgagaggcagggtaaagatcagcacaatgctgaccagcgtcgccagaagccagccgagcgtggtggcgaatccgccaaggataaagtttaaaatattcagaacggtacgcataaaccctctgcttaatacggtggataataaggcacggccattgtagcgttttttacgctggagcacccggtcgctggcggttaaacttaaaaacatccaaactgattgaaattcgacattatatggaacttagagcgacaacattgggcaagcgtatggctcagcatccttatgacagggtgcaacttcttaatgccggagtaaaggtttccggtgatagccatgaatatcttatacctttcaatcagttattatcaattcattgcaagcgtgggctggtttggggggagctggagtttaccctaccgggcgagaaagttgtgcgtttgcatggtaccgaatggagtgaaacccagcgtttttaccatcatctgaacacgctctggcagcagtggagcgcggaaatgagcgatatcgccgctgatgtacttcgccagcagctggcggaagtggcgcgttccagcgcggaaggtaaatggttgacgcgtcagcaggtaagcgatattcagcgcaaaatacgccatgcgctgagcggattacctgtgccgacagtccgtctcgatgcttttgataactgccgcgagctatggcggcaatgccagggttggttgagtaatacggaaaaagccaggctcgagcataaccaaacttttacggaatccatgctggagcaataccgcggattttttgccgcagtggaatcatcgccgttgaatccggctcaggcacgcgcagtcgtaaacggcgagcgttcgttattagttctggcaggtgccggaagcggtaaaacttccgtgttagtggcgcgcgcaggctggttattgacccgtggcgaagcggcggctgagcaaattctgctactggcgtttggtcggcaagccgcgcaggagatggatgagcgcatccgcgagcgcctgggcactgaagagatctcggcgcgtacttttcactcccttgccctgcacattatccagcagggcagtaaaaaagccccgacgatcagcaagctggagagcgacagcgctgcacggcaaaaacttttagtacagagctggcagcagcagtgccaggagaaaaaagcgcaggcgaaaggctggcgattgtggctggaggaggaaatgggctggcagatccctgaaggggatttctggcaggacaaaaagctgcagcgtcgtgttgccagccgccttgaccgctgggttagcttgatgcgtatgcatggcggatcgcaggctgagatgattgccggggcccctgaagaggtacgcgacctttttggcaagcgcgttaagctgatggcccctctgctaaaagcgtggaaaacggcgttaaaagatgaaaacgccgtcgatttctccggcctgattcatcaggcgatcaatattctggataaagggcggttcgtcagcccgtggaagcatattctggtggatgagtttcaggatatctccccgcagcgggcatccctactcgccgcgttacgtcggcaaaacacgcagacgacgctgtttgccgttggcgatgactggcaggctatctaccgtttcagcggtgctcagctctctttaacaacggcctttaatcactattttggcgaaggggattgctgtgcgctggatacgacgtaccgatttaatagccggataggcgagatcgcaaacgggtttatccagcaaaatccgcaccagttaacgaaaccactaaacagcctggtcgcaggggacaaaaaagcggtgacgttattggcggaggacaaactcgacgatctgcttgataaaatgagcggctatgtcaaacgagagcagcggattttattgctggcgcgctatcatcatttgaagccggcggcgctggagaaagccgccacgcgctggccacatctgcagctcgattttatgactattcatgccagcaaaggacaacaagctgattacgtcataattcttggccttcaggagggggatgatgcgtttcctgcaccggcgcgtgagtcgattatggagcaggcgctcttaccgcagccggaggattttcccgatgccgaagagaggcgtttgctgtatgtcgccatcacccgcgcccgcctgcgcgtatggctgttgtttaataaagagcaaccttcgccgtttgttgaaatgctagaggcgctggatgtcccggtagcaagaaagccatgatggctggcggcgtggccgccagcggggcttatttcagacgctctgcaaggtagcgctgataatcagggatcaggatatcaacggggtcgctgaagtgcggggactggataataaagtcggcggttgagacattggtggcgacgggaatattccataccgtcgccaaacgtaataacgctttaacatccgggtcgtgcggcacggcatttagcggatcccagaaaaaaatcaatacatcgattttaccttctgaaatcagcgcacccacctgctggtcgccgcccatgggaccactcagcatcgcatgcacctccagcccggttgcgcgtgacaccagatttccggtcgttcctgtcgccgagagcgtgtgttgcgccagcaatggctggtggcgctcgacccacttcatcagcatatctttacagtgatcgtgagcaaccagcgcaatatgcttgcgtgctggcaaggtacgtgttgttagttccatcatttcattccacattttggcctgtagacagattactggaagtcactgttgctgcaagcgtcgggatgaaaaaatttgacgcatctgcaggtcaggactcatgcgggttcatccggattagcatacacttgggctaaatagcaggaggatgatgatgaaagaaaacgatatcgcaggtattttgacctcgacacggactatcgccctggtgggggcaagtgacaaacctgaccgcccaagctatcgggtgatgaagtatcttctggagcaggggtatcacgtcattcccgtttcccctaaggttgcgggtaccacgctgctggggcaaaaagggtatgccacgcttgctgacgtgccggaaaaagtggatatggtcgatgttttccgtaactcagaagcggcctggggcgtcgcccaggaggcagtggctatcggtgcgaaaacgctatggctacagttgggggtaatcaatgaacaggcggctgttctcgcccgagacgccggtctaaacgtggtgatggatcgctgtccggcgatagagatcccgcgattaggattagcccgttaaacttaaaaccccgcctggcggggttttttattgtcatccctaaaccacctcctagggaggtggtgattgctcctgtaaggctatagcctgaagaatgcccatgtcggaatatctctgcttactcaccacaagtaaaaggagacaaaccgacatgggactttacaggagttcatcacatgtatattggcgttgcaaataccacatagtctggacacccaagtaccgattcaggatcctgaaagataagctgggtaaggagctgtacaggacgatctatatcctctgtggaataaaggattgtgaggttctggagctaaatgttcagcccgatcatgtacatctggtcgtcatcattccaccaaagatctcgatatcaactctgatgggccatctaaaaggacgcagtgccatcaggctttataaccgttttccacatatcaggaagaagctatgggggaatcatttttggtcgcgaggctactttgtcgatacggtgggagtgaatgaagaaattatcagacgatatgtgaggcatcaggagaaaacggaacaaacgtatgaacagcagatggaattgctggagtaatcagcggaaggtgacaatagccccccttacagggggcattctcaaaagccaccttctcagaaggtggtcttttactatcaatattgattaagttatttatggtcaatattttaattaaaactacatcgaaacgtttctttattttaaaataaaacccattgtctttgtggatttaacagacattgtccaggttttatctcccttattacttaaaatttcctcgcgaggataatttattttttataaataaaccatagaaaatacatggggaatccttataaaatattttaaagtttaaaaaaataattgttttttctcatgtcatttatatgactaatatcacagatatttttcgggtagcgttaaaatggaggtttggtgatataagaaatgtattatccatgattttatcttcattgtaataaccgtgagcaatcatttttcttatggtctctattaacatctcaaaatgtaagtttattattttaagttattgtaatttgagtaatttaatttattacagaatgtgatttgattattttgctttcaccttgcgggactccgttaagtggtatatctaataagatgcataattaagaattatctcatacctctgactgcgtcttcatctcaagggtgcaacctgatgaaaaatataaatgtgacagtgaaagaaactggtgctgaatacaccgtcgatggcaatcaagttaatctcaatacgcagtcagtggttctcctgcacgtcaagcgtgaggatattcgttcatatacccgacaaggtaatgatcttgttctaaaactccaaaacggtgacaccgttacaattaaaaactttttcgttgtggatgagcatggacagcacagtgatttagttcttatggatgatgagaccggcgcgctatggtggctagaaggtgcgggtactgatggggcacactattcgctgattagcgatctttcagaagtcatcgcgaccggtggcgcgggacaaagtattgccggttgggtcatggctggcgcggctttgctgggtattgcggcaatgttcgccggcacctcaaacaaagaccaccactcttcggtttctgaaagcgattctgatgctgacagtgattcagactccgacagtgatacggatgctgacagcgatagcgactctgattcagacagtgattctgattcagatagtgattccgattctgacagtgattccgactcggattcagattcagatagtgattcggatgctgacagcgacgcggatagtgattctgatgctgacagtgactccgatactgataccgagctacctaccgcggcacagaacatagcggtcattgacaatgcgggccccatcaccggtgtgctccattctggagatgtcactgacgatacgaccccggagattaaagggacagcagaggctggggccacgataacgatttatgacggcgataccaaactgggttctgtcgtcgcggatgaaaatggcaactggagcttcacgttaccggagctgagcgagggttcccatagcctgagcgcgacggtgacggacaaagccggcaacgtcagcgagcgttcgccggcgtttgaactgaccatcgataccactgcgccggcagccagcattccgcaggtaaccgacaatgttgcagagcacaccggccaactgcagagcggggatctgaccaacgatgcgacgcccaccctgaacggcacggcggaagcgggatccacggtgacgatctatgacggcgacaccgtgctgggcacagtggttgccggcgaggatggacgctggagcttcacgccagctagtctggaggaaggcgcccacagcctgagcactacggtaacggacaaagccgggaacgtgagcgaacgttcgccggcctttgaactgacggtagacactatagtgaacccggttagcgatctgcaggtcactgataatgcaggagaagacacgggtacactgaacagcggtagcgtgacggatgatgatacaccaaccttgagcggtacggcggaagcaggtgccacgatcacaatttatgacggtgataccgtactgggcaccgcgattgcggacgaggacggacgctggagctttactactgacgcactggctgaaggatcccatagcctgagcaccacggtgaccgatctggccggcaacgtcagcgaacgatccccgatatttatattaactgtcgatcttagcgatgataccgactccgacagcgactcggattcagacagtgactccgactcggacagcgatgctgactctgacagtgattccgattctgacagcgactcggattcggacagtgattcggattcggacagtgattcggattcggacagtgactccgactcggattctgacagcgattcggactcggacagcgattctgatagtgacagcgattcggactctgacagcgactcggattctgacagcgactccgactcggacagcgattctgatagtgacagcgattcggactccgacagcgactcggactctgacagtgattcggattcggacagcgactctgactcggactctgactccgacagcgattcggactccgacagtgactcggattctgacagtgattccgactccgacagcgattcggattcggacagcgattctgactctgacagtgactccgactcggacagcgatgctgactctgacagcgactcggattctgacagcgactcggattctgacagcgactcggattccgacagtgactccgactcggacagtgattccgactccgacagcgattcggactctgacagcgattcggattcagacagcgattctgactctgacagtgactccgactcggacagcgatgctgactctgacagcgactcggattctgacagcgactcggattctgacagtgactcggattctgatagtgattccgactctgacagcgactcggattcagacagcgattctgacgctgacagtgactcggattcggacagcgattcggactccgacagtgactccgactctgacagtgattcggactccgatagtgactccgactcggattccgatagtgactccgattccgacagcgactccgattcagacagtgattcggattctgacagcgactcggactctgacagtgattctgactcggactccgacagtgattcggactccgatagtgactcggactccgacagtgattctgactcggacagcgattctgactcggactccgacagtgattcggactctgacagcgatgccgattcagacagcgactcggattcagacagcgactcggactctgacagtgattcggatagtgacagcgattctgattctgacagtgattccgatacggacagcgactcggactccgacagtgattctgactcggactccgacagtgattcggactccgatagtgactcggactccgacagtgattctgactcggacagcgattctgactcggactccgacagtgactcggactccgacagtgactcggattctgacagcgactcggattcggacagcgattcggactccgacagcgattccgattcagacagtgattccgactccgacagcgattctgatagtgacagtgattccgactcggacagcgactctgactctgacagtgactcggattcggacagtgattcggatagcgacagcgattcggattccgacagtgattcggattcagacagcgactcggattcagacagcgattctgactctgacagtgattcggattctgacagcgattcggactctgacagcgactccgattcggactctgacagcgactcggattcagatagtgactccgactctgacagcgattcggactcggacagcgactctgactctgacagcgattctgactcggacagcgactcggactccgacagcgattccgactctgacagcgattcggactctgacagcgactccgattcagacagtgattcggattcagacagcgactcggattcggacagtgattctgattcagacagcgattccgacgctgacagtgattcggattcagacagcgattctgattctgacagtgactccgactcggacagcgatgctgactctgacagcgactcggattcggacagcgattcggactcggatagcgattcggactcggatagcgattcagactctgacagcgattcggactctgacagcgactctgactctgacagtgactccgactctgacagcgactcggattccgacagtgactccgactccgacagtgactccgactcggattccgacagtgattccgattccgacagcgatgctgactctgacagcgactccgattcagacagtgattcggattcagacagcgactcggattcggacagcgactccgactctgacagcgattccgattccgacagtgattcggattcagacagtgattcggattcagacagcgactcggactctgacagcgactccgactctgacagcgattcggactctgacagcgactccgattcagacagtgactccgactctgacagcgactcggactccgacagtgactccgattccgacagcgattccgactccgacagcgatgctgactctgacagcgactcggattcagacagcgattctgactctgacagtgattcggacagcgactcggattcggacagcgattcggattcggacagtgactccgactccgacagcgattcggattctgacagcgactccgactctgacagcgattcggattccgacagcgattcggactccgactctgacagcgactcggactccgacagcgactcggattcagatagtgactccgactcggattcagacagcgattccgattcagacagtgactcggattccgacagcgactcggattcagacagcgactcggactctgacagcgactcggattcagacagcgactcggactctgacagcgactctgactccgacagtgactcggattctgatagtgacagtgattccgactctgacagcgactcggactccgacagcgattcggactccgactctgatagtgattcggattccgacagcgatgccgattcagacagcgattcggattccgacagtgattccgactctgacagcgattcggactctgactctgacagcgactccgactccgacagcgattcggattctgacagtgactcggattcggacagcgactccgactccgacagcgattcggattccgacagcgatgccgattcagacagcgattcggattccgacagcgattcggattccgacagcgactcggactcggacagtgactcggatagtgacagcgactcggattcagatagtgactccgactccgactcggattccgacagcgattcggactcggacagtgactcggattctgacagtgactcggattctgacagtgactcggattctgacagtgactcggattctgacagtgactcggattctgatagtgattccgactctgacagcgattcggactctgacagcgactcggactctgacagtgactcggattctgacagtgactcggattcggacagcgattcggactccgacagcgactccgattcggactctgacagcgactcggattccgacagcgattcggactctgacagcgattcggattctgacagtgattcagattccgacagcgattcggactctgacagcgactccgactccgacagcgactcggattccgacagcgatgccgattcagacagcgactcggattcggacagcgattcggactccgacagtgattcggactccgatagcgattccgactccgacagcgactcggattcagacagcgattctgactctgacagcgactcggattcagacagcgattcggactctgacagcgatgccgattcagacagcgattcggattctgacagtgattcagattccgacagcgattcggattcggacagcgactcggactccgacagtgattccgactctgacagcgactctgactccgacagcgactctgactccgacagcgactcggactcggacagtgactcggatagtgacagcgactcggattcagatagtgactccgactcggattctgacagtgactcggactctgacagcgattctgatagtgacagtgattccgactccgacagtgattcggattcggacagcgactctgactctgacagcgattcggactctgacagcgattcggactccgacagcgattccgattctgacagcgactcggactccgacagtgattctgactcggacagcgattctgactcggactccgacagtgactcggattctgacagcgattcggattccgacagcgattcggatagtgacagcgactctgattcggacagcgattcggattccgacagcgatgccgattcggactccgacagtgactccgattctgacagcgactcggattcagacagcgattcggactctgacagcgactcggactctgacagcgactctgactccgacagtgactccgattcggacagcgactccgattcggacagcgactccgactctgacagtgactccgactcggacagcgactcggattccgacagtgattccgattccgacagcgatgctgactctgacagcgactccgattcagacagcgattcggactctgacagcgactccgattcagacagtgattcggattcagacagcgactcggattcggacagcgactccgactccgacagtgattccgactccgacagcgatgctgactctgacagcgactccgattcagacagcgattctgattctgacagtgactccgactcggacagcgatgctgactctgacagcgactcggattcggacagtgattcggactcggatagcgattctgattcagacagcgattctgactctgacagtgactcggattcagacagcgattcggattccgacagcgatgccgattcagacagcgactccgactccgacagtgactccgattccgacagcgactcggactcggacagtgactcggacagtgactcggattcagatagtgactccgactccgactcggattcagacagcgattcggactctgacagcgactctgactctgacagtgactccgactctgacagcgactcggattccgacagcgactcggattcagacagcgattcggactctgacagcgactctgacagcgattcggattctgacagtgactccgattccgacagcgattctgattctgacagtgactccgattctgacagcgactcggattctgacagcgactcggattctgacagtgactcggattctgatagtgattccgactctgacagcgactcggactctgacagcgactctgactccgacagtgattcggattcggacagcgattcggactcggatagcgattcggactccgacagcgactcggattccgacagtgattccgactctgacagcgactctgactccgacagcgattcggactctgacagcgattccgactccgatagtgattccgattctgacagcgactccgactcggacagcgattcggactctgacagtgattcggattcagacagcgatgccgactctgatagcgactcggatatcccgcaggccaatgcggatactaataccgcgctgatctctgagaaccatgacaatctcgacggggtaaacggtacgattacccagctgacaggcgtgaacctgcttggcgtggtcgatgtttcgctgcttagcggtaataactttgactttactgtcgcgagtggaacgactcaggatgtggcactggatatttccggcggcaccacgctgagctcggcggcgctgattaatacgctactgctgctgctgggtggaacgaataccttccaggccgatctcgcggtggtgaatacggtgaccggagaagtggttgcgctggcgtcgaatgcggtgactattacggcgggaggcgtcagcctggattacagcggtagcgccagcttcagcgacctgccggaggggaactatacggtagtgatttcgtcgccaacgaataccgggctgctgccgacgctggtgaatttcctggcgaatctcagcgtagcgaccgcggtggatgtggcggtaaccgactccgtaggatacgagtccgcgattatcagcggtaacgtactgcagacggacgcgggtggggacgtcggcgataccggtacggatattactgtgaccagcatcgttgcgacctcggttccgggggcaacggcggaaccggttagctcgggggggacgatcgttgagggcgcctacggtacgctggtgatctatgccgatggttcttacacctatcacgcgaccggagacgctgactctgtcggtcaaacggaggtctttacctacaccattacggatgcggatggcgatacggcaacgacgacgctgaccattaatattggcctggccgatgatacggatagcgatgctgattccgactccgacagtgattccgactctgacagcgattcggactccgacagcgactcggattcggacagcgattctgacgctgacagtgattcggattctgacagcgattcggattcagacagcgactccgactcggattccgacagcgattcggactctgacagtgactcggattctgatagtgattccgattccgacagcgattcggactctgacagcgactctgactctgacagcgactctgactccgacagtgactcggattcagacagcgattcggactctgacagcgactccgattctgacagcgactcggactcggactcggatagtgactcggattcggacagcgattcggactccgacagtgactccgactctgacagcgactcggattcggacagcgactcagactccgacagcgactcggattctgacagtgactcggattctgacagtgactcggattctgacagcgactcggactccgacagcgactcggattccgactgcgactcggattccgactgcgactcggactctgactgcgactcggactctgacagtgactcagactccgacagcgactcggattctgacagtgactcggattctgacagcgactcggactccgacagcgactcggactctgacagcgactcggattctgacagcgactcggactctgacagcgactcggactccgactgcgactcggactctgacagcgactcggactctgacagtgactcggattcggacagcgactcggattcggacagcgattcggattcggacagcgattcggactccgactctgacagcgactcggattcggacagcgactcggattccgacagcgactcggattccgacagcgattcggactccgactctgacagcgactcggattcggacagcgactcggattccgacagcgatatcgaggccatccccgatagcaacagcccggacgttgtcgcgctggaaggtaacctgaacaacgtcagcggtaccagcggtcaactggttggcctgacgttactcagcaccgtcgatgtctcgctgctgtcgggcaataatctgcgctttagcgtgggttccggaaccgttgaggatatgacggtatcggtgaacggcaactcgctgctgacggcgagcggattgctgaccactatcgtcaacctgctgggagcaggaaataccctgacggccgatctgtcggtggtgaatacggtcaccggcgaagtcgtggcgattgcggaaaacagcgtctctatctcggcgagcctgcttggcgggctctcctataacggtacggtctccttcgccaatctgccggcgggcgactacaccatggttatctctgcgccggaaagtaacggccccctggtatcgttgatcaacgcgctggcggcggcccaggtggcaagcttcgtcaacgtggacgtgacggattcggttggctacagcgtcggcgccattgaaggtaacgtgctggataccaccgccagcggcgatatgcaggatagcggtcagggcatctcggtcaccagcgcggtatcggactccgtcgacggatcgaccccggttaacgtgaccagcgctggcgtcaatatcaccggggcttatggggtactgacgattcactctgatggcagctatagctaccagttgaccaaaggcggggccgctatcggtcaatcggatgtctttagctataccattaccgatgaagcgggcaatacctcgacgactaacctgacgattaatatcggcggcaacatcgaaccggcgcaggccaatccggatgctcaggaaacggatctgaccgcgacgttcgatacgctcaacggtgaaagcggtaccgttggccaacttgtcggcgtctcgttactcggttccgtcaacgttggcttactcaacggcaatagttttgactttgacgtcgccacgggggcaaacgaaaaagtgctgctcgctgtctctgggaccaccggcctgagcctgggcgcggccctgagcacattgctgagcctgctgggtggcgcatcgtcctttacggcggatctctctatcgtcgataaggcgaccggcgaagtggtgcaggttctgaccaacgccgtcaacattaatgttaatggactcggtctcagcctgggctatagcggcggcggctggtcctcaatgttaccttcagggtcgtacacagcggtggtctcttcaccgaataccggcggtctgttgggcgcgctgctggacctgaacctgggcacctttgtcaacgtgtcggtcaccgactctgagggctatcacaccgacagcctgacggggaacgtcctgcaaagcgatggcgacggcgatgtggcggacaccggggtaaatattaaggtgacgagcgtcaccgccacctcggtgaccgacgccgatccggtatcggtcactagcagcggaacgacgatagccggtgcctggggatcgctgaccatccatagcgacggtagctatacctatcagccgtacggcggagtgaatagtgtcggccaatcggaggtctttacctacaccataaccgacagtctgggccacacggcgagcacgacgctgacgatcgatatcgacagcccggcttcgctggcggtgaatgatgtcgttgcgctgaacgtggcaacggcgctggcaacggtgaatgttccggcgattgacaccgcggggctgaacacaagcggtaagtcgacaacgggcggagtatcagcgagtaagtcgattaactttagcgtgggggccgatcgcgaaatggataccctctcggtgaatgtgaactacaccgcgagtggatcggtggtcaataccgtcaggattgacagcacggtcagcatttatcacgtactcagcgacggcagtaaggttctggtgtggcagggggcaccgacagaaaatctgaccacgattatcggcgcaacagccagcgctacggatacgctaacgctaacgggtgtggcattgagcgaaggaaattacgagatggtcctggcttcgaaagccaccgccactctggattctttcttaacgccagcgccgaattatacggttggagcttctatcaccggtacgacgttcgataccgcaacgcactatacggtggcaggaaccaacgtcagcgggaatatccagaacggaaacaactcgggcggtacggaagatttccatggcgtgctgtatgcctcatacaccgtcgccggacatacttccactggcagtgccgaatcctggaccttcaacagcaatggcagtatcaccaccagcaacggtagcgcagtaaccggaagtagcgtcacaatttacggtgactatggcaccctgacgatggcgaataatggttcttataccttcagtctgaaggcagggatggatgtgtcgacaatcacgcacaaggaggtcttcgcctacacggtaaacgacagcaatggcgtttcttccgcggcgacgctgaccatcgatctgcatccgcagattaccggcagcgtgaacggcgacgatatccacagcaccgcttatgacgataccttcaccctgggtatcggggccgacacggtggtttacaacctgctggccgatgacaataccggcggcaacggcagcgatacctggaaggatttctcggttgcgcaaggggatcatatcgatgtgtcggcgctgctggttgactgggatgggaacagcagcagtctgggcaactatgtgaccctgagctacgttggcaataacacggtggtatccatcgaccgcgacggcggggccggtgaccatcaatcaacaaccttaattacgctggaaggggtgcatatcaattcgctcaacgagctgcttgatacaaataactccaactaatcggcgttatagcgaacggcacacggaagtgccgtccagattatttattgcggaggaatgaatcgggcagcgatccgggagatagcagaccgttatttaataaaaataatgatgcggaaattattatatccgttttttcagtgcgtgaattctgaagggtaaatttgatgcgtctatttaaacaaaaaaggaatgtcataacctgcggctataccgctctctttattgctttgaatccgccgttttcaggtcatgcggaaaattcatacttgatgccgaatgatattagcagccagcgtttaaccgatagccaacaggtcgcggggtacaatgaagagattattaatagccagacccgaatatccggcccgctggatattaaaaaagcggtaaaaaatgcggtcaactggcatccggcgattacccaggaggtcagcaaactccaggaaatggcgcagaaagttgacgtggcgaaagccaaatattacccgcaaattagtgcgggtatgaataatggttatagtaatacttattctgatgccggatatacgccatcgctggtcgtctcggtatcgcaaatgctttacgacttcggcaaagtgtccagttcggtcagagccgccgactccggcgtggcccagcagcaggccaccgtcatgctgaatatcgatcaggtcgctcacgacaccgccgcggcggtagtgcaggtgcagggctatcaaaagctggtcgacatcgctaaagcgcaggtcgattcgcttaaacagattggcgatcttattcgccagcgcaacgatgcgggggcgtcatcgttatcggacgttgtgcagaccgatacccgcgtggagggcgcgcaatctacgctcctgcaatatcaggcggcccttcagcgctggaaagccacgctcgcgacctatatcggcatcggcggcattgccacggtgacggatgaccttccgcaggggatggacgccgcctgcgcggtatccaaaatcgattaccgctctgttccggcggtattagcggcgctggcccaggccggccaggctcaggctcagctggataacgccaacgcgcaaatgctgccgacgatttcccttgagccggaagtcacccattacctcaacgataactacgccaacagcgcggtactgaataaaacgcaatactccgcctgggtgaaagtgcaaatgcccatctatcagggcggtgcgatgaccgcctcacgcgacgccgcccagcaaagtctggcggcggcgaatgcggcgataaaaaccgcccagctggacgccagccagaagctgaacgcctctcgcgatgaagcggttaatcttgcccagtcgctggggattcagaaacgtcagcagcagctgggtgagcaaacccgggcgctgtatcaggatcagtatcttcagctcggctcgcggccgctgctggatctgctcaacgtcgatcaggaaatttaccaggccagatttagccaggtcctgacggaatcacaactgcgttcgctggagctggactgcctgttcagcaccggcaagatgcgctcggtgttcgcgctggaaaaacaaaatatccagggcgtggagatccgcccatgacctcacaaaacgaacgcgccgggataccgcatttgctcgattggtctaatgcgattgcttttattgccaaccactatcgacaaagcttttctcccggcacgctgcatgccgccgccgagtgggcgacgcagaaaaccctgccggaggcgctccggcacctggcgcgccacgccgggctaaactgccagtttttatctccgggcgatgagaaaatgtcggcctggcggctaccgctggtcgtccagctgcgcgacgggcaagtcgccgtgctcgaaagctttgacgttaataacgccgtcggggtgcggtttgtgaaggagctcgcgctgctcagctactgcccgctggaaaccctgctgccggaaattgaaaagaccattgcgtttcgcccgtcagcgccggaaagggatattcgcaccgagagctacctggcccgctttcagccggactggctgcgtaaaattgtgctgaaagatattcgcccctacctgcacgtgatgctggcgtcttttgccataaacgttcttgcgctgagcggtattctgttttcgatgcaggtttacgatcgggtgatcccggcgcagtcttatcccactctttatgtcctgttcagcggcgtattgctggcggcggtatttgcttttgtgctgaaaattatgcgcgggcacgtcacggatctgctcggcaaacgcggggatattcgcgtttctgaccgggtcttcggccacgcgctgcgcctgaaaaacagcgcggtaccgcgctcgacggggagctttatttcgcaaatccgcgagctggagcaggtgcgcgaaatgatgacctcaacgatgatgaccatcgtggcggatttaccgttctttttgctgtttcaggtggtgctgtttatcgtctcgccgtggctaagctggattgcgccggtggcgacgattctgatgatcctgcccggcctgctgctgcagcgcaagctcgcggcgctggccaataaaaaccagcatgaaaataccttgcgtaacgccattctggtggaaagcattcaggggttgcaggacatcaaaatgatgcaggcggaaagccgctttttgcatcagtggaatagctatattgccattaccgccgagtcgggggtcaaaacgcgcaggctcacccacggcctggtcagctggggaatgtcggtgcaaaacctgctctatgccacggtggtggtggtcggcgcgccgctggtgattaatggcgacatcaccaccggggcgatggtggcggcatcaatgctctcgacccgcatggtggcgccgatgaccgcgctgtgcggcgtactcgctcgctggcagcaggtgaaaacggcgaaggccagcctcgataacctgatggcgctgccggtcgaaggggggcaggacgaaacccgggttcaccgcgccgtgctgcacggcaactacgagttccggcaggcggaattccgctacggccttaacgatgccgcgatcccgctgcgtatcaaccagttatccataaaagccggcgagagaatcgccatccttgggcgaatcggcgccggtaaatcgaccctgctgcaggcgatgatgggcaacgtcgagctggtttcgggcgagctgcggctggatgatttaagcctgccgcagatcgacctcgcggatattcgccgcaacgccaccttgctgacccaggaggcgcggctgttccacggcaccctgcgcgagaacctgatcctcgggcgaccggcggcgacggatgatgaaatcttctcggtgcttaccctgtgcggcgcgctggagtttgtgcgcaaactgcccctcggtcttgaacacgtcattatggaaggcgggctggggctttcaggcggccagcggcagtcgctgctgctggccaggacgctgctgcgcgatccgaacattatcctgctcgatgaaccgacctcgtttttcgacgagcgaacggaaaaggcctttgtggaacagctggcgcagtgggccggcgagcgaacgatgatcatcgccacgcataaagctgcggtgcttaatatcgtcgatcggatcctggttatccaggacgggcagctggcgctggataaacccaaagcaacggtttttgagcaagagaaagcccgcgggcaggtggtgaacatatgagtaaaatccccctgatggccgatcacgacccggtggcgctgctgccggatagcgaagaagacgaggcgaaaattgttaaatcgcggcggctgattctcctgctggccgttatgctgctggtgggcggcatctgggcatggttcgcggtactggacgaagtttcaaccggtaccgggaaagtgatccccagctcgcgggagcaggtgatacaaaccctcgacggcggtattttaaccgagctgaacgtacgggaaggcagcaaggtacaagccggacaggttgtggcgcgcctcgatcccacccgcagcgaatctaacgtcggcgaaagccaggcgaaatatcgcgcctcgctggcggcgagcattcgcttaaccgccgaggtgaacaatcagccgctggcgtttcccgactccctgaaagcctggcccgcgctgctggcggaggagacgcgtctgtaccatagccgcaaagagcagctgagcaaatcgacgcgccagctggacgagtcgttaaaactggtgaatagcgaactggccatcaccgaaaggctggcgaaaaccggggcggcgagcaatgtcgaagtgctgcgtcttcgccagcaggtcgcggatattagttttaaaaaaatcgatctcaatacccgctattttgttgacgcgcgtgagcagctgtcaaaagccaatgccgacgtggccagtctggcggaagtgataaaggggcgcgccgattcggtcacgcgcttaaccgttcgttcgccggtgcaggggatcgttaaaaatattaaggtcaatacgattggtggggttattgcgcccaacggcgagctgatggaaattgttccggtcgatggccggttattaatcgaagcgcggatttcacctcgtgatattgcttttattcatcctgaccagcaggcgctggtgaaaattaccgcctatgattatgccatctatggcgcgctgaacggcgtggtggaaaccatatcgccggataccactcaggatgaagctaaaccggatgtttactactatcgggtgtttattcgcactgactatgattacctggaaaataaaagcggcaagcgttttttaattggcccgggaatgattgccaccgttgatattaagaccggcgaaaaaacggtcatggattatctggtcaaaccgtttaatcgggcaaaagaagccttaagggaacgttaatcaacgggcgagcttcttatcggctacgggtcatggccgtttgcggtccgctagcccggacaaggagcgttgagcgccgcctccggggagtgtgccgggccgagccatcggcgcaatatctaaaatgggtttgtttgcagtctctgataataatttttaaacattcaacgcattcttgaataaacggagaggggaagatggcgctaagtgatttactgcaacaagcctgctttcaggcgaaaaaattaaaatccaccgtattgccctctgactatccggcatgggtaatcttctttagcgtcagcgatggccaatcacgcgcgcatatgcatatttctcgcggtaccagcttcgatctcgcgtggctggcgggggccagggcgctgcaggagtggcgtaaaaaacaggaccgcgaaccgcagtggctgcgggttgacgtcgtggacagcgtggaaaagctcagctggcaatccctcaatgaaaaattcatggtcaccaagcgtaactattttcgctttggcctcgcgtttgacccgcagtttaattgcgcaatgctcgagcaggaaattgccggcaacgcgctgctctacgatggcgataacggcgtcgtggcgccgaatagcgtcaatctggaaaactacgcccggcggcggtttaaacagacgcttagctggccgcaggatccgcagcagccgctctggcgctttaaaactcaggggatcttctgcgatcgttttgggacaaaagtgatggaacagagcgggcgaggttccggctatcgcgttatcggggaaaactggcaggacgagtgcctcgccgaggtgattaaaaaaggcaccgattatctggcccgtcaggtaaagcaagacggcctctaccattacggctggtttccctgtttcgaccgcccggtccgatcctataacgcgctgcgccacgccagctccacctattcgctgattgagggctgggaagcgacccgtcagccgtcggttcgtcaggcgatagaccgcgcgattgcgtacctggttaacacgctgattgaagtacggacgctggacgatggacgcgaggcggcgtttctctgcgacgtgggcgatgagatcaagctcggcggtaacgcggtaagtatcctggcgctggtgaaatacaccgaaacgaccggagaccggcaatatctgccgctgatggcgcagctggcgacaggcatcgcctttatgcaggatccgctcagcggccagtttgttcacgtattgaatagccacgatctgtcgctgaaagccaaattccgcatcatttattacgatggcgaagcggcttttgctcttatgcgcctgtacggcctgactaaagcgccgcagtggctggagatggtggaaaaagccttcgcctatttcattaaaaataagcactggcagcaccatgaccactggctgagctactgcgttaatgagttaacccgctttcgcccggaagagaagtactttcgctttggcctgaacaacgtgcgcgatcatcttgattttgtgctgcatcgcgtcaccacctatcccacgctgctggaattaatgatggcggcatctgagatggtgacccgtctggacgcctcgcccgagcatcgccatctgctggcggattttgaccagcagaagttctggcaggcgctggaagttcgggcgcgctatttgctgaacggcttcttctggcctgagctggcgatgttttttaaaaatcccgcacggatcgtcaacagcttctttattcgccaccacagctaccgcgtgcgtatcgatgacgtcgagcactacctttccggctttatcgcctatcagaaataccatttagcggcaaaaaagccgctgctcccgcaggacgacgcgccgccgtcgaataacgcgatccccgtttttctgctggagacgctgcgcgacgtcggcaacggtattgaggtggcggccatgcggcgggcgaagctctttaccgaacatttgcgcaccgtgccctggatagttaccgcgacgtggaatcccgaattgtccagagcggtgcgggcgctgaaagcgcgcggcgcgctgcccgaagaggtgccggtttataacctctatgagtggctcagcgattgctttgagatgaacgcgatcgctgcgctggcgccgctggtgggcaatatcgagctcaggcatgccgtcaatcccggcgcggatgtcgcggtgggtaaacacaacttcctgctgcgtccgcaggggagaatcatcgaagactatattgatagcgccggcaatattctgctgcgcaaaagctttgacgagaaaaagggcaacgtgcagctaagccatcttgaaattgccctggcgggcggtgaagtcaaacgctttgctcaggaagaggcgttttatgcgtggatgctggaaacccggctggcggaaaaagggcgctggcattttatcgtcgataaaaataaaacgtggaaaagcttcgtctgctcgcggcccgcacagcgcatggcgtgtacgctgagcgcgattattcactcccatcatcagctgtctaacggcgcgctgaaaagctcctaccggcatatcctcgaacagccggagcttgtcgatcggctgattgtcctcaccgatgagcagtggcaggacctgcagctggagggtttcccggccgcgcggatggcggtgatccccaatcatctcgataacggcaatattccggcgaacccgcagaaagcgccgtcgcagacggtcatttatctggcacgctactcggaagagaagcagcatgccttgctgctgaacgcctttcgtaaagtgctgacggcgatccccgatgcgcagctgcacacctacggggtcgggccgctgcggcgcagcttaagcgcgcgggtggcggagtgggggctggagaaggcgatccatatcaacggtttcacctccgacatcgcgcaggcgcataaaacggcctgctgcacggtactttgttcgactcaggaggggcagtctctctccgccgtggaggcgatggcctacggtacgccgctgattagctttgccattaagtacggcccgcgcgacatcctgcaggacagggaggcggggattctggtgccctgcggcgatgaggaggccctggcggcggcgctgatcgccgttatctccgacaagtcgctgcagcaaagtatgcagcaggccgcgctgcgcaacgcccagcgctactacggcagcgctatcgccggacgctgggcggcatggctgcagacaagcgagcgtcagttggatgccggcgcggagcgcggaaacgggctggaaaaaaagcgtcctcgggcggttaacgttggctaaccgtcagcgccttttttattcccgcggccctcaggcgtggcgatgagacgagtcatcgcactcctgctggcatcctgctgctgttcgccgctgctggcgcgcgatgtggtgcaggtttcccgctgcgttcccggctctttgcttcatgcgcatcgcctggaaaaagcgcacatcgtggatgactttcatatttactacagcctgcagggtagggacgccctgcaatatccgcaggatagtaccggcgacggcgtgccggatgtcgtgaaagacattgcgagccagctccaggctgcgaaatatctctatacctcgctgctgggcctgcgctcgccgctgcagcagaaaatttatcgccaggcccgacagatcaacatctacctgctgacgctccccaaaggtcacggcctggccttcgatcgggtggcggcagaaaccatgggtgacggaacggcgctgccctgcggcttaaaaattgtccttaacgccgcgctgcggccggcgcgcaacattacgccagcgcatgaattattccatttgtatcaatacggctacggggtttttaaacagaaatggtacctggaaggtatggcgcgctggatggaaaatgccttcagacccgcgcaggaaagagtcgtgccttcacccggggaggttacctgcgagagtaacgtttctcgcggctatagcgcggccaccttttgggccagctatgcgcagcaggcgtttgccgccacgctagtgccggataacgcgctggcgtatcgctatgtcgacggcagcccggtgtttcaaacccggacggtgcccggcggcgcgatgctggcgcctttttttcagcagcttgcgctcagcagccggcgcatttctggtgaaatgaagctgcccaatatccgctggagtgaacagcagcagcgcgacgggcggtacagtcgcctgatttgccaggcgttatccgcgacggcgcagaataaaaaataagcggtatgcatactcattctgctggctgcgcgggcccggattttgaataaagcctgttcatcttttccggcagatcaataatatccgtcaggatgccgcgcgataaatggatatagccgtcactcttcagcttcgataatacccgcatgatgccgctgcgggacaaaaaagagtggtccataatataattcacggcagtgatgttgtttttaattacatttggttcatcaataagttcgagaagatggctacgtataatttcgtatgcggagagttgtgatatcgtcatgcaatgagcatagactttggccgaactataatcctgcagcatcgccagcgattgccagagatgatatttgacgacctgctcatgaaaaaaacgttgtggaatcaaaagtaagcgcgatgtttctttcgttttaacatacagatggcgggtatatgccagctggcagctggcgccaaaaataaacggtgcgctttcagcattaaggatcatcccatcgcttatgcggtttaacgccacgctcccgtcgaataaaatgaggcactgtctttcaccattccgcgtcaggctgatgttgcgttttttgctaatggtgcagggcgtatgctctttagcgattatctcaatcaatttttcaatatgatcggtgggtttcacgactttgcttaaaatttcatcgcggagcagcgagtgattattcctcttcattgttacccttttaaaacaatgagttgaaaatattattgaatggatgttgtacgcgtctaataatcaataatatgctttctgttggcaacttatcgaacattgccaggattattttcctgctataaattacgatttgtaatctaaaacctgtaattcatattagtcaatataaattgattttttttattgtttttttaagccaggtagatctttttttgcggctggtctttttgcgcaaaaagtcacgttattgcgcttgaggaatttctcgcttcgtttttgattttttaacgcgataataagcggagtgagtcaggtaggtatatgtgtttattaaataaaaaagcgcggcgtttattttttatcctatttgccgcatacgcggcggcaaggaggagatgaaaatagccaacggggttttaaacctggcggtatccaggcgtaaaacccacaaatgactagttgcgcaatcgaggggcctgcagctgctggcgaatggttctggccagttcgtccagcgacggctgttcaggatgttcgtcgctgggctcgctgctcagctgcgcttctgcgagataagtgtgaatcggctggccatcatcgtcttccatcaccacatgataccagggcgcaaggcgcagttcgtcgttagcggcgatttcatcctcttccggctccgtgagcgagtactcgggatcgacatcgacgatcacgcccaggtagcccaaaagcgtgtggcgaacttgttggccgataccgaatttgctggctatcataagcacctcctgggagacatgattacctgctatatgcgggccgattctccacttttcaagttacatgatgcggcaagcaaaccctttcagatacagcccttcggggtaggttgctatcaccgggtggtcggcagcctggcggaactgttctataaattgtacatcacgtccggcatccagggcggcatcggcaatgattttctgaaataaatcggtggtcatcaggccggagcaggagaaggtcagcaggacgccgccgggattcaggagctgaatcgccagcatgttgatgtccttatagccgcggcaggcgcccatcagctggcttttgttttcaacaaacttcggtggatccatcacaatcacgtcaaacttttcgccggcgtcgcgatatttccgcagcagcttgaagacgtcgtcgcggatgaactccgctttagacagatccagcttgttcagctcaacgttctgctttgcgacgtccagcgcctcctgcgaggtgtcaacgctgacaacctgacggcagccgcccatcagcgcggagatggcaaaaccgccggtataggagaagcagttcagcacgcgcttatcggcgacgtatcgacgggtcgccaggcggctgtcgcgctggtcaaggtaatagccggttttgtgaccgccctgaatgtctaccagcagctgcataccgtgctcggtaatcggcagcagggcaggcggcagttcgccgacaaccggcccctgcgccagctccagcccctcttttttacgcaccgcgacgtcgctacgatcgtagatagcgcagttcggaaacagcgtttgcagcgcgctgacaatcgacgcccgctggtattcggcaccggcgctcagcagctgcagtacaaaaaagtcgccaaaacgatcgatggtcacgcccggcaggccgtcggactcaccggctatcaggcgatagctatcgagcccgtcgcgggccgccagccactcgcgccaggtttgcgcctgctgcaggcgacgttcgaaaaaggcgttatcaatggcttcattgcgatcgaagctccagacgcgggcgcggatctgtgaagacggcgaataggcgccgcgggccagccattttccctgagaatcaacgatatcgatggtctcacctgaacgggctttaccttccatccgggcgacggcgccggagaagatccaaggatggcgacgcagcagggatttctcgcgtcctttggttaacactaagcgggggaaaatggagtctgtcatggggctacctttaagcaacgggaatgtcggcaccgaaaaaatggcgcgtaggttagcacaagtggctgaggcaagcaccattccaccggtatcgacaagtgagcgtttcggcacaaaacgcaggcgctttggcacaataaaaaacatgccgggatcttacagtatttcctcaccttacggaggaaaatacgatgaaaacaggattgaaggtcgcagccgcgatgatggttattatgagtgggacggtgattgccgcgccgtttagcgtcagcagcgcggatatgcgcgacggccagacgctggcgcagacgcactggtttggcggttttggctgcaccggcggcaatatctcaccgcagatcgcctggaaaaatgctccggcgggtacccgcagtttcgcggtgaccgcttacgatccggatgcgccgaccgggagcggctggtggcactggacggtggtgaatattgcccaacaggtgactggcttagccgctggcgccggagacaaaaataacgctaaactgcccgccggggcgatacaggggcgcaatgactttggctatgcgggttttggcggcgcgtgtccgcccgccggagataaaccgcatcgctaccgctttacggtatgggcgcttgataccccgacgttgcccattgatggcgaggccagcggggcgttagtcggatttatgttacacagccacgctatcgccagcgcgcagttaacggcgctggcaggaagataataaaaagggcggcatgatgcggaacatccattttcaccataacgcgttaacggcggcggaaatcactacccgtcgtttatgcaaactgcaccgcgtcacgctgttctcgcccgcgatctgccgggtaaaccgcggcagtaaggtcattgtgcagggtgccagcgagatgctggcaacgccgcagcagctgattattttgcccgccgaggttgagctcgaggtgattaatcagccggaaaacgggcttttttgctccgacctgctctctctcacgccggaactgctggcggattttaagcaccgctatatgagcgagccgcagaccggtcgtctgacgtcgctttgcgcgccgctggcgccggaaatgtcgtttatgtggcaaagcgtcctgcgggcggtacgggaggggctcagcgccgagctgcagcaccatcaggcgatgggattgctgctggcgctgtatcaggctggctacgccgggccgctgctcaacgagcggcgcgaggacataaccggtcaggtcaggcaaattattatgctgtcgcctgctgaagcgtggagcgtggcgaaagtggctaaaatgctctttcttggcgaatcgacgctgcgccgtcgtttgcagcaggagtcccggagcttccgccagatcgtggaagaggtccgtatggcctacgcgctggggcaattacagtcgacgtcgcgacccattggcgacatcgcgcaaagcagcggctacctgtcaggctcgcgctttagcgcccgttttcgtcagcactatggattattacctaagcatgtacgctgacggaatttgctatcctctgtattgagtcattggccgaaaaggggggaacatggcaacggtttgcacgatggcgtgggtatacggctccgttcagggcgtcgggtttcgctattcgacccagcgcgaggcgctgcagctgggattaacgggatacgcgcgcaatctcgacgacggcggcgtggaggttctggcctgcggagaaccggaccaggtggagaaacttattgcctggctgaaggccggtgggccgcgcagcgcgcgggtggacagggttctgaccgagccccatcagcccaccagagagtggcagaaattcgccattttgtattagatgcatttaaccggtttaggcagtccggcgatttttgtcgcctgcttagccgggcctttcgggaacaggcggtagaggtagcggctgttgcctttctcttcgccaaacttgttcgccatggccttcaccagcatacgaatcgccggtgaggtgttaaattccagataaaagtcgcgcacaaagcgcaccacttcccaatgctcaacggacaggctgatgccctcctgctcagcgataacggccgccatcgcttcgttccacagggttgtgtccttcagatagccttcgctatcggtctctatttcattgccttcaaagataaacatgattcttcacataccgctgaaaatggcggcagtgtagcaaaaaataaggccccgcataagcggggcctgagtacagacggggagaggattagtctctgctggcgaagccaaggatgctcagcaggctgacgaagatgttgtacagcgagacgtacaggctaacggtcgcgcggatgtagttggtttcaccgccgcggatgatattgctggtctcaaacagaatggcgcctgaagagatcaggataaacaccgcgctaatcgccagatgcagagccggcagctgcaggaaaatgttagcaaccataccgataagcacgaccaccacgcccgccatcagcattccgccgaggaaggacatatctttacgggtggtcagcacgtaggccgagcagcagaagaacaccagcgcggtaccgcccagcgccaggccaatcagatcgcccatacccgcagacaggtaggcgttaagcattggccccaggatgtagcccagaaaaccggtaaaggcgaacgcggaaatgatacccgttggcttattcgcggttttataggtcaggaacatcaggccgtacataccgaccagcgtcagaatcagacccggagaaggcagcatcagcaccgtgctggccgtcgccgtaatagcggaaaatgccagcgtcaggctaagcaggaaataggtgttccgcagaactttgtgcgtgctaagtagcgatgaacggtctcgcgacgatgtaattatacgatccatgagtcactctcttatgacagatgtaattaataacgaagcataaaaaaaacagggcctaagccctaatgcttttacccatctttactcaaagtcagcgggctgaatgcagcacattattccaggaaaatcgggataagtggcatttttatttgttcgccttccggagtcagatcgaaatctgataactcactgaaaaatattgcgttatagccattctgcgactaactctggagagggtactcacgaagcgtaacaaaggcaagggatatgaaaacacaaaaatataatcacatcacacgcgtactggtggccgtcggtctgttctccatggtcatcccggcgctggccgctcaggtaccgccgggaacggcgttggccgaaaagcaagaactggtcagaaataacggcagcgaaccgtcgtcgctggatccgcataaagtggaaagcgacgttgaaaacaacattatcagcgatctttttgaagggctggtcagcgtatcgccagcaggagagattgagccccggctggcggagaagtgggagaataaggacaacaccgtctggacgttccacctgcgtcccggtgtgacctggtccgacggtacggcgattacggcgcaggatattgtctggagctggcagcgtctggtgtcgccgctcacggcgtcgccttacgcgagctatcccggcaatatgcatatcgtcaacggggcggagatcgcgcaggggcaaaaagcgcccgagacgctgggcgtcaaagcggtagatgatgccacccttgaggtcaccttaactcagccgaatgcggcgtttttggcgatgctggcgcacccgtctttggttccgctcgataaagtgctgatatcgcgctacggcgacaaatggaccaaaccggagcatatcgtaaccagcgggccctataagctgtcgcagtgggtggtgaatgagcgcattgtggccgagcgcaatccgcgctactgggataacgcgcatacggtcatcaataaggtgacgtacctgccgataagctttgaaaccgccgacgtcaaccgctataaggcgggagagatcgatattgtgtatacggtaccgattaatcagtttgcccagctcaaaaaaaccatgggcgatcagctggatgtttcgccgcagctggccacctattattacgaattcaacaccacccggccgccgtttaacgacccgcgcgtacggcgggcgctgaatatggccctcgataaagacattatcgcggagaaggtgctggggcaggggcagcgtccggcctggcttatcagccagcctgacatcggcggggtgaagctgcacaatcccgagtacgccagctggccgcgcgagaagcgtatcgccgaggcgaaaaagctattgagcgaagccgggtataatgagacccatccgctggtctttaatctgctctataacacgtccgaatctcaccagcgaattgccatcgccgccagctcaatgtggaaaaagaaccttggcgttgaggcgaagctgcaaaaccaggagtggaagaccatgctcgacgccatgcatacgcataattttgacgccgtgcgctacgcgtggatagccgactatgacgacgccgcgacgtttctcaataacttccgcaccggcgacagtgaaaataccagccagtacagcaacccggcctacgatgaggcgctgcgcaatgcggcaaaagcctctgactcgacggcacggggaaagttctaccagcaggcggaggatctgttaggtcaggatgtcccggccattccggtctatcactacgtgcgcacccatctggtcaagccatgggtagggggatttacgccggataagctggggtattactacaccaaagatatgtacatcaaaaaacattaacgcgaagagggcggcttgcgctgaaaatctgcgcaaactgcctgaatttcagacgaataacgcgtttttgtttaattttaaggcagttgaataaattggtgctttacagcctgaacagaggtgtttatagtgcgcctcattggaagcgtggccgagcggttgaaggcaccggtcttgaaaaccggcgacccgaaagggttctagagttcgaatctctacgcttccgccaaattataaataaaatcaatagcttgaagaatggttttgattttatagttcataaagtgatgtaaaaaagcccgtttatacgggctttttttacatctaaagtccgtcatttgctcaataaatatcctttcactagcaatgcccccttttcaggtaagaggcattgttgtaagtcgatacctatggcaaagatactttgttattcgtgcccatcagtatgctactttgtgatggtaaaaatttccctttattttcatctcttccttgtaataatatttttgcatcatctttattatagtcacgaacggctttagctgataactcaccgataatagtgtcagatgagcgtagccggttaataataagaacacactttgtgtcattaaagtcggacatcatgttttgatctccttcgctatcgccagcaactaatattggtcctgtatctttgtaatgttgttgtataaatttctttatggtttcagttttacctttaccttgcgtctggggatagtatggatcgaggctgtgagtcaatctaccttctttatcatataagggatgcattgcatagacatgagactcaggaacagaaaaaccatattttcctgtagtaacgatgctttttatcacatctaaagcagaagcggaaatgacataaacatcaactcctgcctgctgtaggtttttatataatgtctgcatttctgggatcagcctgaatccgtttttccatgttactgatacgataccagctcggcctgccatatctgctgggcttacccatgtcacctttccgataggctggttattttgccactcaatagtatcgtgcactaaatcagctacttcttttttggacatgccagaaaaaagatacgtcacccatggataagatacttcatggtcgaatgacccacctattgcatcatataaatatctcattttcactataaaattcatataattagaattttttttaatttcatcaagcgttttattacccgcaaatccgctgtaattattgtatagccatgtgtagctatcaataatgttttgaccaatgaggtttatattaaccggttgatgatttttattattataatccgagttaaagtttgaaggcggtatatctttgtaaattatctctttcaatatctcaggtttcatagaaaatttaaggttttctagttgatagataagcgttgcctcttcgatatccagaaaagctgttgtgttgtcaaaatcaaaaacagcatataaagaatgcgctggcttctgctttgcttcttgaatgagcctgtcaatttttcttgagttgaactcgtcccaattgccgataactatttgctttttttggggaatcgcagtttctaaattttgtgacacttgatttgtgttactggcactggccgttgttccatatactccaaaaaatgcggatagtagtgcatatattattgtcattttcatgatttattccttttttagggtgcattaccatctgtagcaaaaagtaaaagctagctatatcaaaaattggcaccctgatcatgaatgtgatggttatcatattttatgaatatatgaaaatggtgagggagtaagccagaattatctacagagaaatgtttagtatgacaaggtagcaggcccaaaacagttcgaactatctccgagtgttattttaatgtcacttatctatctacggctagtcctgatggttcttttgctttcttcggcatcgtgcaagcctgtcatacaaaccccgagctatttaatcgctcgggtttttttcttatgtgccgctattctgtatgccattcggttgagtaacccgctctggccgtttgaagctgacaggtgcggttcccttcgcaaagtccccctcatgcgcagttgaggggggggggctcagaagatattgatgctgtagccgacgataaacttcacgtcgttacgatcggttttatagttgctgtctgtcgcccggaagagcgccgggagcagggtaaaggagaggcctttcgccatgccgtccgccaccagatagcgagcggaaagatcgaacgacaccatgttcccgtcgtactttctcgccgaaccggttttactgacatcgctaaccacgtgccagccgtaggttccggcaccgcccagggttaactccggtagattaagatcggcgaagttataactcacgccaaaacgaaccgcgcgggcgccggaaacgttaaagtcttccagctgcgacagcgtcggctgataatcacgcttatcggagttcgcccacggggttaagcggaagttgtaatctccggtgttcggggcgtagttctgactatagccaagggaccacacggtgttgtcgtggctcaggttaaaaccaacccccacataatattccgttgcaggatctttaattttcgacagttcttcaatgtagcgcgcaccctggtagaagagcttactctgcagggagacatcctttgtcaacgtatcgtgacgctctacctgtgcctgccagttgcgacggtagcctttaccttcgccatagcccacgtcaagcacggtattgccaaagttatagactgcgcccaccgtgtgaatgtaatcgatgattgcaccggctttaatggttttgccgttgtcatcgagtccggcggcgttgttctggtgccaggccgtggtcatcggtttaaaatcacggctccagtcgttcttgaagcggtcggcccaggcgtaggtcagcctcagtttgtcgagggtcagggcactgtcaaagccgcgaaaagcgtgagggttgaggccccagctgctttttacggtaccggagttaatgggggtatagcccgcggccagcttgaagttggtgcctgcatcgccaaggttgagcttgagtgcggcaaccgacacgctcatgtaggacttctcgcacgggctgaacttgcccggctcgccgcaatcgtagtcgtagtaaaggatctccgactgaccgacggtatgcccgagcttaatgttggcgttgccccagaaatcaaagccaataacgtcctggtaatagcctgaaatatagctaatcgccacgttaccggtctggttctggatcccggctggacccagtccgtatttaccggtcgcggggtcttttacagcacgatgacgaatatatagtgaggtattgagatttaattttccttcatcataaaacgctttctcaaactgagaaggcgcttcataatccgtttcttcttccgcaaaggcatctgcggcaataaaaagaaacagcggtgtgcacagagaaactctgagtctatgacttgtcattattatataccttataaaaccatgtattatagggcgaggggatgtactgcttatttaaaactcgtgttatttatgagctccgggatttgcgcaccatatttttcgaggagatattcattatgttgtgcggaattcgcaatgttaccgctcaaaaataccggcagagatttattttcactccccaggttcgctatgatttccgcgaacagggtgtgcataataaacagcccggtcattgaggaaaccggcgcgaacggcgttgcatgctccgtaagggaaagcaccgcatcaccgattggcacctggttatcaatggcgacatccacgcagtcccgcagcttaaggccagccttgtgcttcgacggctgggtctcggcatacagaaagctggtcagcgccagggtaaatgccccgtgctgttttgcccagagtgctgcatcgaccggagcggggttaatcccggaagttgagataacaatcagcgcatctttactggtgatcgagaatttcgccagatgctcagcaatatagtcattctgtttttcataatatgatgaggccgccgccccctgatgtaacattaaaggttcgataaatattggccgaaccggggcgatacctccggcacgataaaatacatcttcagcgaaaatatgtgagtggccacagccgaaaatataaattacacctccctggttaatgatttttgccagttccacggcggtggaagtgattttatggctttgctgttgagtaatgtcgttaagttttttctggacgatatctaaatagctctgaatcattgtcataaccagtatcctgaccattgtggttggtagactcggtataacgcttccatatagaagtaatctccccagagattacattcatcgatgcctttaccgagggcataggcgtaaacaccgtgtttaagtaagccttcgcagacatcatcatcgcgggcagacgcgccgcgcattaatgccagcagacattgacgcgccagtttctggtaaccggcatccggaaagtgcttatgcgcttccagcaggccgcagatcgcaatcgccagcgcggagctgtctttcggggcgtccggatctgcagccagcagcagatcccaggcgggaacgccgtcctccggcaggtagcggaagaaatactcgcaggcctgctgccaccgttcgtagtggtcggtttcgccggtggccgaccagtgaagcgggatgccgagaatggcccacgcctggccgcgggcccagcaggagttatcgctgtagccctgaaaggttttcccgtacgaaggcgcaccgcttgtctggtcaaaatagaaggtatggaaagtggagccgtcttcgcgaaaaatgttgttgatgaccgccgcatagtggcgttcagccacttcccgataacgtgattcaccgctgatctttgccgccacgtggagcaggggaaggttaatcaatgaatcgataataagccggtactcctgcgggtcgttaagcgtcccccaggcctggataaaaccggcgctgtggtgaaaacggtttaccagcagatcggccgccgccagaataagcggggttagcgcttcgcgctccgtcagtttccagtacgcgactgccgacaggctataaaggaagccgatatcgtggtgatcgagaacgtggtgcgccgccaggcgggctttaaaactcgccacgttgcgttcaacgccgtccaggtaggcgcgatcgccgctgaactcccaggccattgcctgcatcccggtccagaatccgttggtccagtcgttattctcttgcagaacgtagcgattatggatcgtgcaggctgaggggaatttctcgccgtacagacccatgttacgcgcgatgcgccgcgcgcacgccgtcagctcatcccgacaggtgtcgggcgtgagggcaggaaagggcagcggtgtgaggcgattcgacagactctctttcatgatttttccctacagcgtgaatacgcgctctttgtactgactcatcagcatgtcgttgtattctttaccgccgggcagattgatgctgcgcatcaccggcggcgcgataccttgttccagcagcatctcgatgcagcggatcaccacgttattgatgatgaaggacgcagacagcgatgataccggaccggtcatgatgttgccgttatccatacttagcgtgcagtcaccggacgggcagccgttatcgagagtgacatcggcatagtcgcgaatgctctcgctcgttggcgtcgactcatcggcgtagcgggtgataaccaccagcttcagccccctctctttgaccttgcgtgccagctcaacgtgcagcggtttagtgccggagttggagataatcacaaagcagtctgactcgcgcagatcgagcagcccggagaagatgtcgccaatccctttcagcgaatcaaaccagccggttggcccatagaactggtcaatggctttggtgttgaccaggccgcccgcacgaccggccagctcaaccgccgcggcaaacgagtgcccggagccaaagccgtgaataatgccgttggctttgacgcactcggcaaacagcgccgccgcctgctcaacttcagcgctctgagtaagaaacacctgattcagcgtcgctaaaacatgctgataatactgctgctgatgtggtgacatcccttatcccttatcggcttttaaaaacgtggtgatacaggcgttcggctcttccggcgtcatctgcgccgtcaccgccacgcctttttccagcagcgcgttgatggccgcgatctcagcatcgttgacgctgaccgagcgtttgatctggcggcgatcgtctttgttggacatattgccgatattgagctgggggagggcaatcccggcgttcatcagcttcagcgccagctccggggtcttcagcaggatcagtacgcgctgaccgtcgtaatttccggcgaggatattggcgctggctttctcaaaagagagaatagaggtgttgcagccttccggggctgcactgcgcagcagcattttctctacgtcgtttgcagctacggcgtcgtcaatcaccataatacggttggcgttgaagtagcttacccagcgggtggccacctggccgtggatcagccggtcatcgacacgaatatgcacaatacctttcatgataagttccttaaatcaatgtgttacttaaccgagaatattcaggttgtagccgataatacctaaagcaatcaggacaaaaatgacccgagtcgagttcatctttttgagccccagcagccaccaggtgaaccccacaaccagcagcggaataagcccgggcataatctggtcggcaatgctctgcagcttgagcgacacttcgccgtagctgaattcgaaattaagattcgccttcaccaccgaggggataagcgccccgataaccgtcagcccgagaatattggctgcgcgggtaattttgttgaggctattggtcaaagaccccagcaggttgaccccttcctgataccctttgctgatgctaaagcgcataaacagcatgcgaaccagggcgaacagtagccagagaacaagccccaccgggttgccctgcagcgcgaggtacgaagcgacagaaccgataatggtggtcggaataacaaagaacagcgtatctccgatgcccgccagcggccccatcagaccggttttgatcccggcaaccgcatctttgcccgcaagcccggtttgctcttccagggcgatgttcaccccgaggatccccggcgccatggtgttgttggtattaaagaactggctgtgtaccttcgccgcgtccttctgctcttcgggttttgcgtactttttctcaaggaacggatagatgctgtacagatagcccagaccctgcattttttcgtagttccagcctgactgaccgaacaggaaccagcgccagaacacgcgttttaatactttattcatcgcccattgctccatttgccggggattcggtagtttgcgttacctgtttttctgagttgaagacgtaaagcgcaattgccagacccagcagcgcggcgcccagcaccggcactttcagataggccgccaggaaaaagcccagaatcagaaacgagatgttcttcttaatcggtaaatagcgcagcaggatggagatacccagcgcaggcagtaggccaccggcgactttaagaccgttcatgatggacgcggggatccaggtcacgacgtcattaacaaaggttgccccgaggatcagcgccaacagcaccggcagcatacgcgagagcgaaataggcacctggcccagcaggttcatcctggccgccgccttcacctgaccctcttcaatcagcctgtcggccttatgatggataaaggtgttgctgaagcgggcgaggatatccagctgtaccattaagagaccaatcggcaccgcaatggtggcgccaaacgccgcgccctggccgctgatgatcgcgaaagtggtacccagcaccgcaccggtcatgtagtccgggatcgacgcgccgccgaagttgcccacgcccagtaccagcaggttcagggtgccgccgacgataagcccggtggtcatatcgcccataatgaggccggcaaaaaagcccgccatgctcggtttcactaacccaagcgtcgtgttgttgccgtcgtatatcgccagccctgaataaagcgtcagtaacgctatctgccagaccgcaatgtgctccattttttactcgtctccgtcgtctgtgtgggcggcaagcgctgcctgctgtaaatggtaaataccatcacgcgccgtagttattatttcattcagcgaggctggcgagtgactttcatcaattgccatggccatttccagaattaaatttaaattcatcccagagagcagggtgatattattccataggttgttagtgacaataatctccattgcggagttatacggcgaaccactttttaaatcagagaggataataattttggattttgctgcgctaaggatggtgattttatcgagaagttcctgtttaaatactgctatccctttctcaccatccagttcaactacatgaaggtttggctgcgctccgagtattaattctgtggcctgtctggcaccgctggcgaaacccccatgtgagattaataataattggttcatcctgcccccttatctggcgttcttatttcaatataaaatgattctaaccgtttccaggtctcaatatattcaatcacctgaccttgctcgtcgtgggtatagcgtttcatcatgataacgggctggtgagccgtgagctcaaggtgccgcaggacttctggcgcagcatcggtcagggcgcagatggtctgccgatagggcatggtgtacatatcaagaccattgttaaccttaaaagcctcataaatagagctgagtgccgaattcttaatcgtcaattgactggcgaagtagcgggccggaatatgcgaaatctgtaatgcataaggtttgttattatcaaactttaagcgcgcaatacgataatatctttcatcatcatttaacccgagcttttctttaatacacggatcgttttccagttcacaggcgataattttaaccgactgcatgccttttaaatcgttatctgattctgagaaaataatgttctcattacgtttggctttcgaaacaaaagtgcctttaccctgatagcgaatcaggtagccttcattcaccatttcgtgaatagcgcgaataaccgtggcggaactgacggagtaacgctcttttaattccgactcactgtagaatttttccccgggtttaaaagtgccgtttcttatttcatctaacagtgctgcctttatcacctggtatttcgttgactgtgcagttgctttcattgtttcgccagtttctgtttacatttattttatttcgtaggcttacgatacccgtacccgattgtccgatcaacctcccaacccaacttaaccggttaacctgttaagttatttcctggactgtgatgcatttcgcaatttcgccccgacggagggggcaggggcgaggaatttttgccgcagcggccgggcgtgaacgcaaactgattgccgcgctattgcgctggcgagctgagaaaacggagcgcccgcattcaacaaccccggccagtacatcgcgcggggttttctttttacagggcgccaatgtggtgcttgcgtgccctaacgcagctgcgcgcaggcttcggcaatccgctgacaggcctgcgtcagcagtccatcttctaccgcgtaggcaatacgtaaataccccggcatgccgaacgcggacccgtgtaacacggccacctgagtgtgttctaacagccagttcgccagcccactgtcgtcgcggagggtttcgccggtgggcgtcactcgcccaatgagccgctggcagttggcaaacacatagaatgcgccctgggggatgccagcgctcaggccctcggtagcggctatcatccccagcacctgctgacggcgtttatccagcgtgtgcagccagccgtctaagaagtccgccgaatggttaagggctacgaccgccgcagcctgcgaaatcgcgctggggttggaggtgctttgtgattgcaggatctgcatggcggcaatgagccactgcggcccgcccgcatagcccagacgccagccggtcatggcgtggcttttggacacgccgttcaccgtcagcgtgcgcgaaaccagctgcggcgcggcctgagcaaacgtggtgaacggggtattgtcgtaacgcagcggctcataaatgtcgtcggccatcaccagcacctgcgggtaggccgccagcacgtctgccagcgcgcgcagctcccgttcgctgtaaatcgccccggtcgggttgcccggcgaattgaggatcaaccagcgcgttgacggggtgagggcggcggccagttgttccggcgtcagcttccagccgtgttgttcatcgcagggcacaatcaccggttcgccgtcggccagagagaccatatccgggtaagagacccagtagggcgcgggaataatcacctgctgcccggcgtccagggttgccagaaaggcgttgaaaataagctgcttggcgccgctcccggcgatgatctcttccggacggtagcgcagctgattgtcgcgagcgaacttggcggcaatggccgccttgagcgctgcggtgccggaaacggcggtatacttagtctggtgatgcacgatagcttcaatgcccgcatagctaatatggggcggggtagcaaaatccagttccccttcgcccaggttgataacctgcttgcctgcggcttccagtacccgtacctggtcagaaatggccgcggtcggagaaggccgtacggattgcatacgacgggcgatttgactgttattcataaatcctcttttgtatctaatgattcaattaatacaattaggtacccaacatcagcaggaaactcgccgtgtcaccgatctttattctcgataacagctccgcgcccgcccgctacgggattaccgccagcctgtgggccaatcgtcttgggttgcccctctggagccttcgccccgacttcgccggggatgtacccgatagccaccagcacgtcattcgtgcagggtactgcgtgaccagcggcctctggcgcagcgatacgctgcgtgaagaggtgcgcgatatcgcccgcctgccgtcatcagacgccgtcattgtgctggcgtcctcgcaggcgccgcttatcgccgacctgccgggtcagcggctttacagcgacgaaagccgccaccgtctgacgctcagcgatgggcaacacacgctgttagatctcaccgccgaccgctatggccgctgggatagcggcgtgtcgtcgtctgccggcgggtccttgcgcatcgcgctgattggccgcgaggcggaccaccgtctggtctatcccgccacgctcggctcgctgggcgatgccgcggcgtcgctggggctgaacctggaggtccatttctttgcgccggtcagcctgtccacgggattacacgagcttcaggccttccagggcgtggtgctgccaggcggttcctcgatggcggcggtcaacggacaaatccgcgtggcggaagagaccctggcccgcgggcagccaacgctggggctgtgcctgggaatgcagagcatgatgaccgcagccgtgcgccgtagcccgggtttcgaatcggccattcccgcggaagtcgcccccgatgaagccctgcacagctttgttccctttgccgatggccgtcatcgctgcggcgtattccctttttcctccgggcttatccccggcgatatccgcgaaatgcactacaaccatcgctactgctttaaccccgagttattgccggcgctgtctcccggcggggtcagcgtgagcgcgcaaagcgacggtatcgtggaagccgtttcccagcctgagctgccgttctggcacggggttcaggggcatccggaactgatgtcccgcccggatgcgccccatccgctgttcgtcgcgttcctacaggcggcgcttaacgcgccagcgtaaccccgctgcgatggtcgctggcaagctcctgcattacgcgggtcagctctgccagcgccgcgtcgccgatcggttttaacggtgcgcgtacggtgccgccgttaaagccgcgcagcgccatcgccgctttcaccagctgcggctgaccgtgtttgcgcgccagcgcccgatacgcgtaccacagctgatgcaaatcgcgggcggtggcggcgtcgccccgttctacggcgcggaaggtattgacgatcagctccggcagcgcgccgctgttggtcgtgctgacgccgtcaaacccggccatcatcggcccgaggaaagccagatcggaggcgcagaacaaacgcagacgcccgcgcaggcggttggcaatctgatcgatggcggtagggttgagatcgccctgtttgatgccgaccacgttcgggatctctgccagccgttccagcagcgccggggagagggtgatgccgatgcccggcgcgttgtacaccagaatgccggttttggataacggcgccatctcattgaagtagctgacgatctgttcgtcagtgatttcgctaacaaagggggcggtgaccatcggcagcccgcccagctcgcttgccagctgggtcagctcgcgggcgtcgcgcgggtcggaactggcgctgcacagcatcaccgccacgcggtcgtccacgcagcccatcacctcatgaaacagctcgcggcgttcttcgacggtcattaccggaaactcaccgtaggtgccgccaatcagcaggccgtcatagcccagatcaatcacgcgttcgatattttcacgcagcgccgggaagtcgatcgcgccgctggcggtgaacggggtgacggtgatgttgaaaatgccgcgcaggcgttcacggcactcgttgatatctttcatctttctttccttacagcagcgttaatgggcgagccagggaacccagctggcgatatccggtttcagtcaccaccacggtttcgctgacgccgacggtgaattgaccgtagatacgcagggccggcgggatgtggaaggtcatgccaggctgcagctcggtggtgacgccgctgtacaggctgagaatgccgccttcgccccagtccggcgcgaaggcgataccgatggagtaaccggtgcgttttttgaagttttcggtgaatccggcgcggtcgatcaccttctggcaggccaggtgcggcgcttcgcaggtggcgcccggacgaatggcgtcaagggcggcctgcagggcttcctgacaaactttttccatttcgatggcgatagcgggcggacggcccagccaggcggagcgcatcatcgcggcgtggtagcgatcgtgggcggcggacatctccagaaagaccgggtcgttatcctgcatcacccgacgtcgccacgtgccgtgcggcacgccgctgcgtgggccggtagaaaccagcggttccatgccgacatactcggaaccggcggcaatagcggcccccatcatcgcggagaccagcgcgttttcgtccgcgccgctgccaatcgccgccatcccggcgcgcatgcccgcatccacatagcgcgccgcgagggcgattttttccacctccgccgccgatttcaccgcgcgcagcggttcgatgacgcccgcggtatcggcgatggtgccgagcttcgcctgcagggcttcatagacggcaatcggcaggaaccagccgcgtttgtccagcccaatgcgtttgttgagccagccgcgctgttgcagcatgcccaccagaaaatccaccgggttatcgccatcctggtagatggcggcgtctgaaataaaggtgttggcgataaagttaaagtattcgagctggcgaatcacaaagaccggatccccttctaccggcagcagcagcgcctgaaaggtgtaatagcccggcgtttgctgaccggtaagccagaaaatgttttccgggccggtcacgatcattacgtccacgcccgcgcggcttaagcgttcgcgggtacgctgaatgcgctgcgcatattcgtcggcgcgaaaggcggactcgctgccctgaatcacattgttaacatcttgcatcattaaactcctggagtaagttggcccgcgcggcatcgaactgcacgcccagaccgggagagtcgttaacggcgaccatgccattgcggtattccagcccgctgacgggatcgtcggttaatccatcggcgccatacagttcggcgaatgccggttgcaccacgcggcacagctggagcgcggcggcggtggcggcatggccttcattcatctggccaatcatgaacggcacgtcggcgagtcgcagacggccggcggcggcaagcgtcggagcaagtccccccagtttcaccagcttgagatgcccccacagcgcacctttggcggcgataagccgggtgatggccgcctcgctgttgaggctttcgtcgagcatgatcgggatgccgtagccgtacagttcagcaagctggctatcgtttgccgggcttaacggctgttcgatatagctgagattcagctcgcgcagataagggaacgccgcgtgagcctgcgccagcgaccactggccgttcacgtcaatcgccagcgaaatctgctgaccaaaccgcagcctcagcttttgcaggcgggccaggtcggtggcgaaatccgctatccccgtgcgtaacttcagctgggtaaaaccgcgatcgacatagcgctgcgcctgcgccagcatctctgcttcgctgccccagaacagcgtctgattggtgtgccaggcgggcaggccagctggcgcccccagccaggcggcgacgctgaccccgttctgacgcgccattaaatcgtgcaacgccatatccagcgccatgcgcgacggcggcagcagcgtgcggtcctcctcgtgcagcgcggcaagttgcgccgcgggctcctggcgccagtcccaaccgttgaggcgctgaagcaggttattcagcacctgctcttcgcggtagccgtgcaggtagcgaatgttgagacgcacttcgccaatccccgtcacgccacggtcttccaggcgcaaccagagggtgtcgagcgccgtcaccgggccggaggcggcggtatgcagcgtcacgccggcgtaatgcaggtctccccgaaagagctgcgctttcataaatcggacgccggcggcagcatggcgagcgcaatatcgagatagatatctgccgcggcgataaattcatcgacggggacgaattcatcgggcttgtgggccacggacagcgagccggggccaatcaccacgccctttgcgcccagcgaacggaaatgcaccaggtcgcagccgccctgaaaaccaaacgggccgggctcgctctgtccgtgacggcggcaggcggcaaggctttgctcgacaatggcttcgctgctgtcggtttgcgtcgcgccgccggtggtgggctgccaggcgataatttccgcttccacgtttgcctgcgcgtacgcgtggtcgagcagctgttgcagttcggctttaacaacctcttcgtcttcccccggtaccatgcggcgatcgagcagcagctcgcagctgtctggcaccacgttgtccgcatggccgccgtggatgcgggtcaccgtcaggctggcgttgccgaccagatcgtggcagcggcaacgcacctgctggtggtgggcctcttcgatcagccctaaaaggcgcgcggactggtaaatggcgttaacccccagctccggcgtgccggagtgcgcggtgacgccttttacccgcacgcgaggacgcaagctgcctttgtgagccgagaaggtcgcattcgatgtcggctcgccaatcaccgcgaaatcaatcgccggcggggtgtcgcgtacgtagaatttcgccccttcgctggcgacctcttcatcggcggtgaacacgcccatcaaggtgccggaccagcgctgacggttggcggccagcagacgcagggcttcaaccatcgccaccagcgggcctttggcatcgcaggcgccgcgcccgtacaggcggccatcgcgttcgctgagggtgaagggatcgctcgcccagccgctgcccgccggaacggtgtcaatatgggtgttgaaggcgaagcacggtcccggtccattgtgcaggacggcgataacgttggtccgccccggcgcgtattcgctaaaggagagatcgaacccggcggtcagcagccagccttccagacattcggcggcttcacgctcatggcccggtggattttccgtattgatggcaaccagcgtcgctaaatcctttttcattcgtgcgctgtcaacctggtaactggacataggaactccgtgattaatgtaatatttgcgtcaggaagcgctgcgcgcgctcgctgacgtggccggcgaagaaatcaccggtgctggcgcgatcgataatttcgccgtcttccataaaaagaatgttgttggcggcccgccgggcgaagcccatctcgtgggtcaccaccatgctggtcatcccttccgcgctgagctctgccatcacttccagcacttcgcggatcatctccgggtcgagagctgaggtgggttcgtcgtagagcatcagctcgggcttcatcgccagggcacgggcaatcgccacgcgctgctgctggccgccggagagctcgtccggaaagtggtctgcgcgttcgttgatgcgcaccttcgccagcaggttgtccgccagcgtgcgggcatcaatgcggttcatccccagcaccgtcattggggccagcatgatgttttccgccgccgtcaggtgcgagaacagctcgtagttctggaacaccatgccaatacgctggcgcagtttgtgcaccggcacttcgccccggctgatgtgctggctggcgaaaaagacgtcgccgctgtcggcaggtgagagcatgttgacgcagcgtagcagggtggattttcccgagcccgatggcccaatcagcaccacggtttccccgcgctgcacctcaagtgagcagttcttgagcacggtctggcgaccaaaagtcttatcaatgccgatcatctccagcagcggtttctcgctcatggttcctcccgggcgattttcggtaatttaaacaggcgggtcagtcgcttctggctcttgctgcgccgctgttttggatccagtacgctttcaagccacgactggaagatcatgaacaggctggtgagcagcaggtaatagagaccggcggcgcaaagcgcttcgaagtagcggaagctggcgctggcggtctggttggcgaccagcagcagctcctgaacggcgataaccgacaccagcgcgctcgatttcagcatgctgatcatctggttacccatcggcggcagaacgatgcgtgcggcctgaggcagcacgatttttcgcatgatctgcccgtgggtcatcccgagcgccatgccggcggtgcgctggccgctttttacggcctgcaggccagagcgcagaatttccgccatgtaggcgccttcattaagcgaaagcgccagcactgcacaggtaaacgcggagaagcgtaagccgaagcctggcagcacgttgtagacaaagattatctggaacagcactggcgtcccgcgaaacagccacaggtagaaaaaggccagccctctcccggcgcgaaacggcgcttcctgcaacagcgccaacaccaggcccagcaccacgccacacaacagtgagcagagggtaatcagtagcgtcatccacgcaccctgaacaaactcgggtgagaggaagtactgccacattagttcgatcgacatagctttctccggttaatggcaaaacggtttagaaaagggcaacggagtcagggaagttccatttctcaatcaattgcttataggtgccatttttgacgagaccctggagacctttctccagcagggcccgggtttcggtgtcgcctttacgcacggcaaacgcgatatgggtatccgcttcgaattcgtcgccaaccgcggcaaacatgcccgctttttcggttaacagggcgacggtccccggcgtggagaggaactcggcatcggcgcggccctgggcgacggcgacggcggagtcggtggcggcggggaaggtcatgacgttaatggccggttttttggcgtccaggcagcgctggttgtctgcccgggcctggctctcttcgatcccgccgagcgtcacggcgatgtttttgccgcagaggctcaggtcgcgtccggtgatttttgccgggttacctttgctcaccaccacgcggctgccgattttcagatatggcacgaagtcgacctgcgcggcacgggtcgggttgacgtacatggcggagttgatgatatcgagacgtttcccctgcagcgctgggataagccctttgaactccatcggcatcggcgcaggcgtcagccggatctctttgcttagcgcgttaatcaggtcgatatcgaagccggtgagcttgccctctttcacgaactcaaaaggcataaacgtcgccgccgtgccgtaggtcagcttgcccggggcgatggtttccaccgctgcatggcttaccagcggaagtgcggtcagcgcgaacatcaaggtacgcacgcggcgaaacagtaaagaattgctggacatagtcgtctcctggttaagatttaaattgaatttattgagtcaataaatacaatcaagcgtgtgaaaaaatgtctcatcctggtgcgtattgcacgctaatcgtgcagtccttgctttgttttgctgcgttttgttgcccgtgatattgtatatatcgatcacaacaatgcatttcagggaaccgttctccatgcagcctgactccactgcgagcagtcgccggatcgcccggcaaatactcgacctgatatccgaagcaaaattcgatccaggtcatcatttacgggagcaacatcttgccgatgcgctgggcgtgtcgcgtacgccggtgcgcgccgggctaaaagagttgacccgaatgggggcggttgaagcgcgtccgaatcagggctttttcctgcttaaacgcagcaatgagctggagctgctggagattgagcagtccaagagcaatgaccagaagctgtacgagcagctggtacacgatcgtattgcgggtgcgctgccggaatcgtttacccagaccgaaatcagccagcgctatgatgtcgatcgcggcgtgctgacccgtacgctggtcaagctatcggaggacggcctgattgcccgtaacgcggggcacggctggcgcttcctgcaaaccctcaactccgatgtcgccctgcgcaacagctacggttttcgcctgatgattgaaccgacggcgctgctgacgcccggcctgcatgtggacaggcagatgcttaaacgcctgcgcgcccggcatctgcggctcatcacccacccggacattactcaggtgccggcaaaagagattttcgaaaccgacgctgagtttcacgagctgctggcagaagccagcggcaacctgttcgtgttacaggccattcagcaacaaaaccggctgcgccgtctgctggagtttggcagctatcacaataagcgccgcgtaaaagcgtggtgtgaagagcatgttgccatcatcgatgctctgcgagagaacaagccggaactggcggcagagttgatgagaacgcatctgcaatacgcctttgaccaggtcaatgttaaaaacgcccacgcataactggcatcgctcttgcacatgttgcttctgaaaatacaatcaggagcacttatggattttcagatacaacaacgtgtggcgctggtctgcggtgccggcagtggtctgggacaggctattgccctgtccctggcgcaggaaggggtgaaagtggcggtcaccggccgcagcgcggaaaaactggcgcaaacggtggaacgtatcaccttattgggcggtactgcccgcgcctggcggttggatctcgccgccccggagcagtttgatcgagtgattgccgatatccgcgagcggtggggcgatatcgatattctggttaacaactccggtggtccgccgcccgcaccggcgcaggggacggatggcgcagtctggcaacagcagttttcagtcatggtcgcctcgttgattcagctcaccgataaactcctgcccgccatgcgcagccgcggctggggacgcattattaccaccacttcatccggcgtgataacccccattcccggactcgccctgtcgaacgcgctgcgcatgagcctgctcggctggtcgaaaaccctcgccagcgaagtggctggcgacggcgtgacggtgaatgtgatggtgccagggcgcatcgcgaccgaccgcgtcagtcagctggatgctctcaaggcgcaacgggaaaacagcagtgcggaagcggtcgccgaaaagagtcgtcagagcattccggccgggcgctatggcgaaccgcaggagtacggcgccgtcgctgcgtttctggcaagccagcctgccggctacattaccggcgcggtgattcgggttgatgggggattgatcggcgcgatttagtcactgagaatgcgtcatgccggtcggtttcgcagtggaccggcatgactgcctatcagccgctccgaatggtttattttgcaggcaacgaaatccagttctgcaaatttaaccagcaggcattgggatcgggtctgaaaacgataacttttctgattaaacttttattcttcctgcgttgttaaagtggaatggttcaccataaataatgcgcaaagcgcgagcagtacggccccgccggtaagtagccacccggcgtggtgaaacgcggctaagctcccccgggtatgggcaaatctgacgtagcaggcggtcaccagcgccgcgcccgccatcgccccaacgcgctggaggatattcagaacaggtgcggcatcagccacgtgacggctgccagccatagccaggcccgcagccatcgcgggcaccgttgccagggctaaaccgaaccctctgaccgctattgcgccccccacaagcgtatagcgacttccctcatcaatcattgccagtggcaatgtggcaaatgccgcgagtaaaccgccaatgataagcaccgttcgtggccccagcttatcggagaagtagccggccatcggaaatcctatcgccgagccgattaactgaggggtgagaagcaggcccacttcagcaagcgttacatggcaaacgtcgcggaaatataaaggaagcaggaactgaccgccaaaattcaccgcgccgccgatagccatcaatacggcagataaagtgaagccccgatgcttgaaaagctcgagatgcagtaagggggactcaatgcgcaaagagcgataaataaacaagcaggtgaacagggcgcccacgctgagcatgatgacgttcctgccatatttaccactattcaggctgagctctttcatgccttccatcagcatcggcaggctgcaaaagaccagcgccagtcccagccagtccagagagaggggcctgtcagtttttattgtcggacggggaagcagcttccatccggcaagacaggcgcacagacagaacggcaccgtgatccaaaataaccctcgccatccgcagctttcaagcaggaccgcgcccagcgatgttcccagcaagggagcaatgacgatcgccacgccaatcgtgccaatcactcgccccagacgttcgcgtccgacgaccagaccaaggatcgtttgccctgccggtacgagtaatccccctgccaggccttgcataactcttgcggcaagcagcacctcaaaatgcggggaaagggcgcaaactgccgaaaaaatcgcaaataaaataaggccatagagccaaagctgcgtagcgccaaaccgcctggccgcccatgcgctcagcggaacgcctgccgcaagggccataagatacgccgttgctatccattgtattgccgtgtccgtcacgccaaggccggcggccatcgcgggcagcgccgcgctcagcatcgttgatgagagcatcgttgcaaacgcccccagggtgatgatggccgcctgcatccacagcatcggaggtatggcgtttatcggtcgcggatgggttgtttccttgacccgcttgtcttgattgatattcataaaaagccccctaaggacgatgtgcgaagaaatctatcattgattaataaacctatcaatgatagatttatttgcattaaagattccgccaggcgctgagttcagacaaaatggcgcttcacagaccactggccggtttgatgcatcaataaagggggaatatcatggcgaaaatccagcgagatcaggtgattgaggcagcattagcattattagatgaggtcggcctggaagcgatcacgacccgtaagctggcgcaaaaactgggggtggaatcagcgacgttgtactggcatttcaagaacaaggccagtttacttgaagaaatggcttccgcggttttagccaaacaccattccctgcctgtccccgaagatattgctgaatgggcaaactggctggcggataacgcccgtagtttccggcgcgctctgctcgcccatcgggacggcgccctgttacatgccgggacatcaccggcccgggtgggaggggatacgtttcgtcccaaggtggcgtatcttgcgcgcgtcggtttcactgaggccgacgccgcaatgatattactcactctgagtgaatacaccctgggatgcgtattagaggagcagtcccgctcgggcggtgatgataatcaaattttatcaaagccatcgccaggaattgcctctatcgaatcgctggtttatccccatccggatactgcgttcgaattcggtctgtcgttgataatgaaagggttattagtgccctgagcttaacgctgcgccggtgacaacatgatgtgcataccttacgcaaaaactatcttgataaaaccggcagcattcagaaggggaggcgacatgtttatttccgaaacagtgatagccgtcatcattgactggatcgacaataacttacataaaccactgcgtatagaacagatagcccgttattcagggtattccaaatggtacctgcagggtttgttcttgcaatatagaggcgagagcctcgggcgctatatccgtaataaaaaactggactcagcggcccgcgatttacgcgagaccgatgagaatatttacagtattggtttgcgctacggctatgactcgcagcaaacattcacccgattatttacgcgtcattttcatttgccgcccggtgaatatcgcaagaaaaacaaaacagcctgttacgtaccgggtaaggctgaatcttaatctcctttccgatagccctggcaaagccgccgcagaaaaatcgatgcgaagagatttatcaaaaaatagaaaaacagacggcgccgaaaagacaaaacctcctgttctttgtgtaaacatggggaacggcgcggaaaacgccgcgcctggtgagttatcaggaggttgctggtcagcagagcgattaatggtaggcgggaagccagctgccgtgtgcttcaataagatcgtcgcacagattgcggatgtcatcgatcgacagctctgcggaagtatgcgggtcgagcagggcggcatggtagatggcttcgcgtttgcgcgtcaccgccgcttcgatggtcaacagctgagtattgatgttggtccggttcagcgctgccagctgctccggcaaattgccgacgtagcacggcgtgacgccctggccatcgaccaggcaagggacttcgacgcaggcctcggaaggtaagttggtaatcaggccggtgttgagcacgttaccgccaattttgtaaggccgatcggtttccatcgcttcgatgatgtaagacgcgtattcatgggtacggctgtgggtcaggctggtgtcatgggtcagcgccactttctgctgctgccattggtcaatctgttcaatacaccggcgcggatattcatccagcgggatattgaagcgttcaatcagctccgggtagctgcgtttgatccagtaaggcatgtattcggcgttgtgctctgacgattcggtgacgtaatagccgaaagttttcatgatttcatggcgcaccatatcatcatgcttgccctgcagggcgctggcccggcgcttgatttccgggtacaaatcctcgccgtgacggcgaatgtccagcagccaggccatgtgattaatacccgcgatatgaaattgcacgtcgtcggttggcatatccacgcttttcaacagcgtttcagcacatacctgaacgctgtggcacagtcctaccgttttcacttccgtatggcgcagcatggcgcctgttatcgtggccatcgggttggtgtagttcagcagccaggcgtccgggcacacggcttcaatatcccgtgcgaaatcaaacagcacgggtagggtgcgcagcgcgcggaagataccgccaatgcccagggtatcggcaatagtctgctgcagaccatattttttcgcgatcgtgaaatcggtgatggtgcacggatcgtagccgccaacctgaatagcattcaccacgtaattggcgtttttcaacgccgcgcggcggttctcaacgccaaggtaagcggcgatcttcgctctgcccgcattggtattgcggttgatattattcaacatggcgagggattcattgagacgggcgctgtcgatgtcgtacagcgcaatctccacctctttcaacgccggcgtcgtcataatgtcgccgagtacgttcctggcgaaaatggtgctgcctgcgcccataaatgtcactttaatcatgctatttctccgttcctgctgttttcaccaggcagaatgtacgctgcggaatgaacaggaaatatggctaaatgtgatattggtatggcgaaaaatgatgtcgctatgaaagtgtgagccagctccgaatctggctgaaacgcggtgactttactgcaggcatctctgataacgtgggtgaaaaagagagagcgcgactgatgcacaagacttttacccttaatcataccgacaatatcgaattgaatttgtaccagtacggcgaggagaattgtcataagggacaccgctttggccccgcagtccgccagcattacctatttcattatgtgataagtggaaccggcacattttacagtgagtttggcgcttttcctgtcggcgccggggaggggtttctgattcatccccatgaggtgacaacctactgcgctgataatagggatccgtggcattatatgtggcttgaggtcgatggcctgattgccgccagaattttcgaggagtgtcatcttagtcggcaatctccggtttatcgccccaacctgaataaagacgactccagctcctctggctacctgcggcaaattgtcgaacatggcgatgaacatccgctgaaggtgcagggattgtgctatctcttcttttcttcgctaatcagcaatacgcccggcgaaaaggcttctctccctgatgataaaacccggcatctgcaaagggcgatcaaaaaaattgaaaatcgctaccacgaacatctgacggttgatagcctggccgcctattgcaatatcaatcgcagctacctctgccggttgttcaaaggcgcctacggtataggtcctaaggaatacttgctaaattttcgtatgaacatcgcagtaagcctgctgaaaaacagcgctacggcgattaaagtcgtgggtatttccgtaggctatgaaaatcagctgcatttttctaaagccttcaggaagctgtacggcgtatctccggctaaatggcggcaaaaatacctttctgaacagcaggcgctgagatgacgttcagcgcttattctcatcggcggtgactctgcgcgatcgctattttgcgggcgtatcctgattgagaatgcgcgatcgacaaacatccagaatttcatctgccagagaggagctatcaggacaggcgcgggaaaggaccagcgcgccgacaagatgcgcaatcgtatcgatcaggtcggcacgcgtaaggccttccgcggctttctcatttgctaaggtggccagctgagcttcaatgccagccgcaaaggttgccttaatggcttcagattgacgcgcggcgtcactacccagagccgacatcacacacccctttgccatgtcatcacgatgttggcgggagaggtaatactccacaaacgttttccggctcacatcggccgtacgttctgccgaacgcgtaaagccgcaatgcatcgcctccgataataaatcggccttggaaccaaagtgtttgtaaaaccctccgtgggttaagccagccgctgacatcagctccgctacgcctacgccgtcgtaaccgcgctcacgaaaaagttctgaagccgtttcaacgattcgcatcctgttttcgcgaacctgctcttttgacactttcatggcttacccccttcaaaacaaaggctaagtatacattgatgatgatcataatcaaaccagttgactttatagatgatgatcatcatcattaatcctgcgcatttacccgctacccagcagaggaagaaacatgacgaattcccccttatttcacccctacgaacctggaacgataacgcttgctaacctgaacaacatcttgagagcgtactcagaatgaacaataaacgtgtggctctggtgacaggcgcttcttcaggcatcggcgaagcgacggctcatcaacttttagcggcgggttataaggtttatggcaccagccggcgtggctctcaggcgggtacacaccgctttccgctgctgacgcttgatgtgactgacgatgcttcggtcggggccgctattgacgatctgctgcgcctggaggggcggatcgatattctggtcaataatgcgggctttggggtcgcgcctgccgccgcggaagaaagctctattgaacaggcctggagcattttcgataccaactttttgggcatcgtcaggctgacgcgggctgtgctccctcatatgcgccgtcagggcagcgggcgcatcatcaatatcggttcgattctcggggtcgtgccgttgccgtatgtcgcgctttatgcggccagcaagcatgcggtcgaagggtacacgggagcactcgaccatgaactgcgcacccagggcatcagggtttccgtgatcgaacctgcctacataaaaacgcagtttgaagccaataacagagaagcggatgcaaagctggaagagtatgaccttatccgggctaagctgacgaaagtggtcagtaaggcaatggccgaagcggaaagtccggaggttgtggctaaggtggtggttaaagcggcccaggctctacggcccaagatccgctacacggcaggatcgctggccggtaaattgaatttcattctccgattcgcgcctgcaaaaatcctggataaggtcgtgcgcaacagccttcagcttgatgcgagagagtcatcatgacattttcgcgactggccgcgtcaggcatcgtcgagcggcgtgaaggatatgctaacgggcaaattctgtttgccgtatttatcgagccgttactgggaaccgcttttttactcggcaatagcggcgccagaaaacatatcaggacaaataccaggaaaccagcaccatgaaagccttcacgtttaaacgctacggtaaatccccggcgctgggatttgatgacgtcgattatcccacccccgcggctgatgaacttctggttaaagtttacgccgttggcctgaatcccattgataacgtgattcctggcggcctgttcaaaccgattttgtcttttaaacttcccgcaacgctgggcagcgacttgtccggggtggttgtggcaacgggaagccgcgtgacgcgttttaagccaggcgatgaaatcttcgccagtattttcgacaggggaaccggttctcttgccgaatttgcgcgagtacctgaaaatctcgctgccatgaaacccgcaaacctggatttcgaacaggcagcgtcgctcccgatggtgagtctcaccgcctggcaggcgctgacagagagagccggactgcagccagggcagaaggtgttcatcccggcggggtccggaggaataggcagtttcgcgatccagctggcaaagcatcttggcgcaaaggtgggaacgaccacaagttcaggcaaccttgcgtgggtgagtcgtcttggcgcagatgaggtggttgactacaaaaagcagacgtttgaaaacgtgctgagcggctacgatattgtactcggcactctccggggagattcgattgaaaaagccgttaaaatactcaagcctggtggcaagattgtttccctcaccggaccattggatgccgcgttcgcccgtgaccgggggttaaatttctttttgcgttttatctttgcgctgatgagccgaaagatcctgcgtcttacacgagtgcggggtcttagctattcgtttttatttgtccgccccgatggcgagcaactcgcgcaaattagccaactcatcgaatccgggcagatcgggcctgcgatcgacaaggtgtttccctttgccgaaacaaaggaggcgctggactatcttgcccggggccatgctaagggaaaggtggtcgttagggtgtctgggtcataaccgcagcggttttccgcttcaacaaaaacactttcgtttaaatccgtcgtccttactctccatcgggagcgccctgaggacggccttagcccgctgagaaaagcgggcgtcacgccgtagcgttcacttccatcattgagataagctgtcataggtgagccgatgcttttgttggcaaaggattttgtctgatacaattttgctcggggagcatccgaatctggcccaacagcgtatgtcgcctgacgcggacgcttcgggcaggtgccgtcacctgtgaggatgatattgcgcgatcctgaaacaagtcgaaatcgtgacttaattctaaaatggtcacttgttgtcaatcaaggcgcatcacgctaagctgaaaaaatgactaagaatatgaacgttccatcatcacgcggcccgctcgatcacagcgtccgggagcaaatcgtcgacgctgcctttgagcatttcgggcattacggctatgaaaaaaccaccgtggcggagctggctaaatctatcggtttttcaaaatcttatatctataagttttttgaatccaaacaggctatcggcgaagtgatctgcgctaaccgcctggaaatgatcatggccgcagtactctcagcggtggctgacgcgccgtcagccagcgaaaaattacgccgtctcttccgggcgctgactgaagcggggagcgaactcttttttcacgatcgtaaactctacgatattgccgccgtcgcctcgcgggagaagtggccttcaacagaaaggtatgcggaacggctgttaaagctgattgagagcattcttgttgaaggcaggcaggccggggagttcgaaaggaaaaccccccttgatgaaaccacttatgcgatatacatggtgatgtgccccttcatcaatcctgttcaactgcagtttaatctcgaaacggccccaacggcggcggttcttctctcgtcgctgattttaagaagcctggccccctgatttgtgaccattgactttattggtcactagtctgagaatgcggaaaccatcctgttatttgattaagggtttcccatgctcaggcttcattcagcccgctttgccgcttgtcttctgccgttggccctcgtggcctgcggtgataacgcctcgagtgacgatccgcgcacccagccgccgctcgtcagatccgcatccgtagaactcgcgcacgatacctctcgcgcctataccggcgtggtggtggcaagaacgcaaagcgatcttggttttagagtgcagggtaagatccttgaacgctttgttgatactggccagaccgttaagcgcggtcagccgctgatgcggctggatcccgccgacctgaagctgcaggccgtggctcagcaacaggccgttgacgccgccagggcgcgggcgcgaaaagccatcagcgatgaggcgcgctaccgtggcctcgttggcgctggcgcagtctccgcctcggagtatgaccagatcaaagcggcggcagattccgcgaaagcggatctcagcgcagcccaagcgcaggcaaacgtggcgcaaaatgccacgggctatgccgtgctgctggcggactctgacggcgtggtgatggagacgcttgccgaacccggtcaggttgtcagtgccgggcaggcggtgatccggctggccagagcggggcagcgtgaggcgctggtacagctgccggagacgctgcgccctgccatcggcagcgaagcgctggcgacgcgctatggcgacgaaacgcagcccgtcgccgcaaaactgcgcctgctttccgatgccgccgatgccaccacccgtacctttgaggcgcggtacgtgctggaaggcccgttagccaacgcgccgctgggggcgaccgtaacgctgcacatcaaaaaacagagtggggaaagccaggtcatgcaggtaccgctggccgcgctttatgatgcgggcaagggaccgggcgtctggcggatctccgcgcagccagccagggtcgcatggcagcccgtcaaggtgctgagcgtgggcgaggaggcggcgcaggtaacgggcgaggtgaagcccggtgaggagatcgttgcgctaggggcgcatcttctgcacgagggcgaggctgtccgcctggccgggcaaccggatacggcccggacgggggataaaccatgagccagggccgctttaacctgtcagcgcttgcggtgcgcgagcgctcggtcacgctgtttttaattattctggtgactatcgccggtatttacgccttttttggcctcgggcgagcggaggatcccccctttacggttaagcaaatgacggttatcaccgtctggcccggcgcgaccgcgcaggagatgcaggatcaggtggctgagccgctggaaaaacgcctgcaggagctcaaatggtatgaccgcacggaaacctatacccggcccggcatggcctttatcacgctctcactccaggacaatacgccgccatcacaggtgcaggaagagttctaccaggcgcggaagaagcttggcgatgaaagcagaaacctccccgccggcgtgacggggccgatgataaatgatgaatttgccgacgtcactttcgccctgtttgcgctgaaagcgaaaggagaaccgcagcgcctgctggtccgcgatgccgaaacgttacgccagcagctcctgcacgtcccgggggtcaagaaagtcaatattatcggcgaacaggccgaacggatttatatctctttctcccatgagcgtctggctaccatggggctctcgccgcaggatattttcaatgcgctgaataaccagaacgcattaaccgcggcaggttcaattgaaacgcgcggcgcgcagatctttatccgcctcgatggcgctttcgatgaattgcagaagatccgcgatacgccatttattgctcagggtaaaacgctcaagctgtccgacgtggcaacggtagaacgcggttatgaagatccgcccactttgcagattcgtaatcaacatgaaccggcgctgctgctggggatcgtgatgcgtgaaggctggaatgggctggcgttgggtaaagcgctggatgccgaaacggcaaaaatcaatgccagtatgccgctggggatgaccctgacgaaagtcaccgatcagtccgtgaatatcagcgccgcagtcgatgagtttatgatcaaattcttcgtcgccctgctcgtggtgatggtggtctgttttgtcagcatggggtggcgcgtgggggtcgtggtcgcggcggcggttcccctgacgctggcggttgtttttgtggtgatggaggccgccggtatcaactttgaccgcgtgacgctgggctccctgattcttgcgctgggcttactggttgacgacgcgataatcgccatcgaaatgatggtggtgaaaatggaggagggctacgacagaatcaaagcttccgcctacgcctggagccataccgccgcgcccatgctggccggtaccctggtcacggctatcggctttatgccgaatggtttcgcccagtccaccgccggggaatacaccagcaatatgttctggattgttggcctcgccctgattgcctcatggctggtcgccgttgttttcaccccttatctgggggtgaaaatgctgccggatatcgcaaaggtagaaggggggcataccgccatctatgacacgccgcgctataaccgctttcgccgcctgctgacccgcgttatcgccaggaaatggctcgtggccggttccgtcatcgcgcttttcgcgctggcggtcatggggatggggctggtaaaaaaacagtttttccccacctctgaccgcccggaagtgctcgttgaagtgcagatgccctatggcacctcgattgagcagaccagcgcggcaacggtcaaaatagaggactggttggaaaaacagccggaagccaggatagttaccgcctacattggccagggttcaccgcgtttttacctggcgatggcccccgaacttcccgacccgtcgtttgccaaaatagtgatattgacggacagccaggcatcacgcgatgcgctcaaattgcggctgcggcaagccgtagccagcggactggcgcctgaagcacgcgttcgcgtgacgcagctggtgtttggcccgtattcccctttcccggtcgcctggcgagtgatggggccggataccgatacactgcgcgacatcgcggaccgggttaagggcgtgctgcaggcaagcccgatgatgaggaccgtcaacaccgactggggatcgcgcgtgccgacactgcatttcaccctcgatcaggaccgtctacaggcaaccggcttaacgtccaatgccgttgctcagcagctccagttcctgctatcgggcattcccatcaccgccgtgcgggaagatattcgctcggtgcaggtgacggggcgcgccgcgggggatatacgtctggatccggccaaaattgaagggtttagcctggtcggcaatgcgggccagcgcatcccgctcgcgcaaatcgggaaggtggaggtcagaatggaagatcctttactgcgtcgccgcgacagaacgcccacgattaccgtgcggggggatattgccgataatcttcagccgccggacgtttccgcctccatcatgaaacagctgcagccgattgtggactcgcttccgccggggtaccgcatcgaaatggcgggttcaattgaggaatcggctaaagccacccgggcgatggcgccgctgttccccatcatgatcgccctgacgctgctgatcatcattgtgcaggtgcgctcaatgtcggccatggttatggtatttctaaccgctccgctcgggcttgtcggcgtggttcccgcgctgctgcttttcaatcagccatttggtatcaacgccctcgtcgggctgatcgcgctttcgggcattctgatgcgtaatacgctgattcttatcgggcagattcaccataatgagaaagaaggtctcgatccgtaccattcggtcatcgaagcgacggtgcagagagccaggcccgtcttactgacggccatggccgccgttctggcgttcattcctctgacccattcggtgttctgggggacgctcgcctataccctgattggcgggacgttggggggaaccgtcatgacgctggtgttcttgcccgccatgtatgcgatctggttcaggatccgtcctgaagcccggcgccatgctgaacaacattaaggcgctcgtctgcctgctcaacgaacgcctggcgtgaccgtccgaaagcagagaaaagcgccgcagtccgcggcgcttttcatcacgcctgaatatagcgatgaatattgggccccatggtgtattgttcggctgtcagattgggaaaaccgggagtttttgaatattcgggttatcccggttcttttttattaaagaaaagcgtaaatcatcagtagccagagtatggctccaacggcaataatcattttcaggatgaagttactggctgggaaaaaatacaccgccggcagtgcggaacgcctggccttaataagtaaataaggcggcaataatatactccacagcaccagcgagatgccggcaaaggccagggcagacaaaaatccttgcggggcaaaaatagaggctagcgcggcaggaaaataggtcaaaaatatggccagcgggcgtgagccccggcggttaattttgttcagcatatcctcgagataatcactcaaaccgattgaggctaacatcagtgaggctaaaacggcaatacatccaaaagagtccagcatccgtaggcggcctgccgaagcaggccggcagcagctatttatttcgtggcttcagccaatgattctctgaagtttttatggaagtcgtcgatttgcccgctctcgtggagcgccgacaatgcgcagcgcagaatggcgtgcccttcttcaacggttggatacatcgccacggtcgtcgcgaagccgcgatcgtgcagttttttgcacatcgtgatggcgagatcttcgttaccaatcaggatcccccgaatcggcatcgtcgtaccccggttaacgatgtcgatcttgccgaaaacttcgtcaaaatagcgaatgacgttctgaagcttctcctggcgggcagcgacggtgccgtccaggtggagatcggcggcggctacgcaggcggcaattccaggcaatgaaggcggcccaccaaaggcgtaggttgtgccgtaggtcttaataaatttgatggtctcagcgtcgcgacaggcgataaatccgccgtgtgagccaaaggctttagatagcgagccggcgataataatacgttcgtcaagccgatggccgaggcatgacataacgtatccggaaccgtactctccgtagatagaggtgccgtgcgcatcgtctatatacgcgtagccgtcatactgatgcgccaggcggacaatatgcgcgacgggggcgacgccgcccattgagcctacgctgtctgataccgagatcggcgttaatccctggctggccgcatagcgaaaagcctcttcaatccgcgccttatcctgaaaatcaattctgacgacttccccaaactgctgtaaaagcccgcggttgatctgcaacgtcgcgtgcgcggtcttctccataataaaatagggttttttgctgaacgtaaaatgcggcagcgtcccggatgccagcagcggcagcactgcgatatggcaaggggtcacggcgttaaacgtcagagtatgagccccatgcatgatgtcgttcagtcgtgcttccagctgcgggaacagatcgacttttacccgcgttctggcgacagaaacctgcacgccaaaacgctcaatggcgtcgacaaccgcttttttcagcgccgggtgagtctctagcccaagataagagcatgagacaaattccaccatttttctaccatcgtcgagggtaatgaccttgccgtccctttttaccgcgaccagttcattaatatgttcagagaatacccgggtctgatattttagcgacctgtctattttccttttttgccagttttccattgcgttaccttcattgtcgtgactaccagaagagacagaattgccagcgttaacgtgctggcaccgagggttctgtcaaaccccataccggtatccgttagttttacggcgaaatagctgatggcgccggcgctcaccgtttgaataaatccggtgacggacgccgcaatacctgttttgctgcctttgatttgcagcgcgataaaattcgcgctcgggtaataggcgccaagggtgaggttaaaaatcatcgagccggtgatacataatagtagtgagtggctgccgataataaatggggtaaccgccagcgcattcaggagaaataaaatccacgggttaattattcgctcgaatttggcgatctgattgccaataataaaaaataatacggaagcagaaaagagcagcgagtagtgcatggtgcttagccccagctgctgcataaaaatggccggcgacagcgagatatagcaaaacagcgaactcagaatcagcgaaaccagcagcgttccctgaataaatgccggggtgataaacccggaagaggagggcgccgcggccgcatcatgctgctcaaggcgacgcggagagagcacaagggtgacgacgctaaacagggccatgaccaggaatatcgaattccagctcagatagccgaggagcgcggcgccggccagcggcgcaataagaggaaccaccgcgctggcggaagaaatatcggaaagcgcgcgcttgagcgttagcggggagaacgtctctttagcgatagctttagacaggaccggcccggcgccggcgccaagggcctgtaatgccctgccggccaacagcatcattaaactatcggacataaaacagaggaggctgcccgcgaggaaaagcaaaaagctggccgtcagtacgcgtaatttacccagcttttcgccaagaaatcctgataataactggctcgccgcgtatatcaccagaaaaccactaatggttaactgaatagccgaataatcggtagtaaacgctttttgtaataggggcagcgcgggcacgatcatatctgtcgccagcgcggaaaccgatgcggcgagaataaggtataagtatatcctgagcatattaaactcttcggtgaatatgggttaaaacgttagattattatttatgaatacgccgctgcttttttagcgaatgagcaaatcgcgattccggtcaaaattaatagcgagctcagtaaatgatagagatgcggctgggtatgtaaaaacacaatgcttaatatgccgccggaaagtggaataatatgggtataaatctcaccgcgagtcgcgccaatagccgcgatgcctttattccagaacaggtaggccagccacgaggggaaaatcaccagatacgccagtccagtaaggaaagcgatatcgtggtaggcggcgaatgaggtggcggggtgcagccacagccagaaaatcaccaccggaagcagaataagggcgccaagaagcgaactgacggcgacgaaagcattggcggggatacgacgatctttgttacgcaacagcgagcagtatactgcccagcttagcgccgagcccattgcccacagatcgccctggctaaacccttttagcccctctgcgttgctcaggttgccatgcagcaggagcagcagcacccctgcggtactaaagatcacgccccaccagttccgcgccgatacccggtcatggaaaatcaggcgattaatcatcagcaccatacagggggtcgcagacatgtaaatcgctgcgttcagcgcagacgtcgactgcagaccaatatagagggttaagggaaagctcacctgtccacacagcgttagaaccagcagcgttgcgccattctggcggaacaacggccgactgtcgcggatttgccgctgatacagcaataccagcagtagtgcggtcaacgcccatctcgcttcggtcatgagaatcggatccgcgccctgaacgagaatatgccctacgacataattccctccccaaaacagggccgccagcgtgagtaacaggtaaggcatgctcattccttgcatcgcttcgaactgtactaaatggtaactttattttttttaatatatcaattaaattttatggttattgggcggttttattatttttttattttaaatcatatgtttaaaaattagttacctgtgtgcaaaaaatctgattgcagcatatttgtctgtacgataacgtatatataccatgcattaaacagggataaatcaatgcgtaagacagaaaatggtttcaccgggaacgaacaacattccgcaatggccaggctctctctggatgacatgattgaccagcttcttcacagcaacgcgctttcactgaaactgacggccaatccgctactggcggacagagcctggtacctgaccgaaaatacctgtactaaggcttttaccgccaacgatccgcaagcgaaaaaacgtgcccacagcgcgctgtttaaactctaccaggcgtggctggcggagccgctatcggcggcggcaaaaaaccagtttcatccattactctgcgggatcagaagctacatcgaatcagaatggctccgggtggaaaaaaaacgtttcagtttcccgatacccgcgcttgacgccgggaatatcgttgaggaactccgtcatttatgtcagaaacatccggcttcgcaccatcccctctttgattttctctcctcttccgcctctgctacgcaaatagactatttcttcaaaagcgatagcgcgctcaatctgctgtttttcgatctggtcgcgatggggctggtcggctctctgccagaaacgcgtgcagagattgcccagaacctttgggatgaaataggccagggcagccaggagtttacgcacgttaatctgtataaggatttgctgaagcgcagagatattgcgctgcctgaaaaccatttcgcccatctgtatgactggcaggggctcgccgggtataacgcgttcatgctgggcggcgttaaccgtcagcattactacaaatcgctcggcgtgatggcgatgacggaactgctggacccgccgcagtaccagaagctcgtgaccgggtgccgtcgcattggccttacggatcgcgacgtgcattattacgcggaacatatcgaggttgatatcggtcacgccgatgggtggctgaataacgttatcgttccgatcggcaataaaaacccggctgcgctggaggaggtctacgttggcgcagcgctgcgtcttcagacctgctgcgattactacgattgtctgctggaggcgttacgtaccgttgttgaacgcgagtcagagggtgccgccctctgaataaataagcgcttttgccgcgctccaggccgttattccgggagggatctcccggcattccgaggactccgcctgctgagcggcaatggcgccgtcaatcagcatgagcatcatcatcgccacccgttccgcaggttccggttttaacagcagggtaagaatgtcgcggaaaaactggtagaggcgcgatttaaaccgtgagcatgtcgcccggatagcggaagacgaggttccatattcaaacagggcgcgggtgaacatgcagccgtggaaatcctcacaggtgaaccagttattgtaatattcgaagacggcaaacagcttctcgcggcctgaaggtttatcggcggtaatctcctgcagcgcctgcataaactcactctctttctgctgtaaaatatcaagaatgagcgcctctttatccgcatagtagcggtagaaggtcattttggagatgcccgcattctccgatatccggtcaatactcggcgactgatacccctctttgttaaacagagacattgactggcggataatttccgcttgttttggcttcatactgtttcccgtggaatgaagtaatacagagggtttctggtagcgagcagtcattcatttgatatggcgggcggcacgctgcaacgacgtatgcgcaatgtcatcccgatggccgatatcccagcccctgcggtgagcggcatcagtgaacgcgttgacccataaaaattgttgtcgattcttacatccggctgcaaaaaaagcaaaaatccctcaggcgatctttgcgctgcgcgaatcagggctgcgctgggccgccacgttatgcccttagccctccacgctgcgcgcggggaggataaagagaggcccgggagaagtcagcatcccccccgaacagggggtgatgtttttgtgatgcacatcataaaataacgcctggttattgtgatgttatttgcagtcaatggatttgcatttgaatcaacccgcgctatctctgcgggttttttttcgtccggcgatggtcggcgggcggcgactccgcctgctgtaaatagtcctgataccagccgctgatacgtcgggtcaccggattttcgttgaggtcgaagcgcctgccgtcgagcctgtttaccggggtaatacctgccagcgttccggtgacaaaagcttcgtccgcagtgaaggcttcggcaagggtaaaggatctttcctgcacgccgaggccctgctggcgcgccagtgacaagatcgtgtggcgggtaataccgttaaagcagtacaggccgtttgaggtccacagctcgccctggcgtacgataaaaaagttggtggaattgcagctggcgacaaacccatgagggtccagcatcagcgcttcatctgcgccggcgtccagcgcctgcaatagcgcctggatcaaattcaggcggctgtgggaattaagacgcaaatcgaaaacatccggcgcgctggtacgataggtcgaggtgagcagggcaaggccgcgccgtttggcctgttcatccacaaccttatattccgccacgcagacgatagtggcgccgccgaggataaagcgcgggtcctgatttggcgtgcgctttttgccgcgggtgatcatgagccgcagatgggcgccgtccgtcataccgttgatcttcagcgtgctgtacataatatcggttagctcctcacgactatggccgatattgagctggatagcggccgccccggcaaacaggcgatcgagatgcgcctgaagggcgatcagcttgccgttcaccagccgcagcccctcccagaccccgtcgccgcagacgtagccggaatcgaaaacggaaaccgtggcgcgatcgcggtgaacgaattcgccgttgacgtacacctgcacattgtcgttgcgcgtatcctgcaggtacgcctgactgctttgagcggagagagctaaactcatcatgtttccttgcggttaaaatgcccgttcagcgaaacgggaaaggaaggcctgggtgcgcggttggcgcggatggcgcagcacctcttccggggtgcccatttcatgaatcacgccgttttcgataaaaatcacccgatcggcgaaatgccaggcaaagcccagctcatgagtgaccagcagcagcgtccgcccctcatctgccagttcacggatggtatgcagcacttcccccacgagttcagggtcgagggacgaggtgggctcatcgaacaatattatctctggcgccattgccagggcgcgagcaatagcgacgcgctgctgttgaccgccggacaggctgccgggccaggcctggtgcttatggccgagccccactttttccaactgcgcgtgggcaatgcgcatcgcctcttcgcgacgcatctttttcaccgatatcagggcttcgctgacattttgcagcaccgtgagatgcgggaagagattaaattgctgaaacaccatccccacgcgctggcgaacatcgctcagctgtttttcgctatagcgccgctgaccgcggctgtcgattttaccgagggtaacgccgtccagttctacggtgccagcgctgggtatttccataaagttcagacagcgcagcagggtgctcttacccgagccgctgccgccaatgatggcgattttctcaccggcatagatatctaaatcgatgccctgtaacacgctttgcgcaccaaagcgtttgtgcagggcgcgtatccgcatgacgacttttttctctgacatggcctttctcatcatattaaggatgtggacggtagcggcgctccagacgtgccgccaggtaacttccgggccagatcagcacaaaatagagcagggcgacgacggtgaaaatctccaccggacgataccaggtactgcttagcagcctgccctgatacatcagttcgttaaccgtgagaatcgaggccagggaggtcaccttcgccagttcaatcatgcggtttgtcagggctggcaacatacggcgaaatacctgcggcaggataatacgccgcagcatcacgcccggcggcatgcctaaggcttttgccccttcccactgcccgcgttcgatggactgtagcccggcgcgaaaaatctcggtgctgtaggcggcggtgtacagggttaacgccagcgcggcggcgccaaaagtggaaaactgaatgcccaccagcaccggaaaggcatagtagaaccagatgagctggataagcaccggcgtattgcggaacacctcgacaaaggcgctggtaaggggataaaaatagcgcggcccgcgggcacggacgacgccaacggcaagcccgatcagcgtgccgacaattcccgccagcagccatagctccagcgtaacgcccagtcccttcaacagtaccggcaagttttgccagacaagggaaaagtcccactgataatgcatggttgttctctcgttaacgtgagtcggagacggcaaggcgtcgttcaagcagctggctgccctggctgataatcagcagcagagtgaagtacatcaccgcaataagcgaatacacttccaggggccggtaagtctgactgttgatttgcatcgcctgatacagcagctcgctgtacgccagagacgaagcaagggcggtggatttgagcagttcgaaagaacgctcaaggaaaggaggaatcattctgcgcagcgcctgagggaaaatgacccggcggagcgcggtggcgcgcgacatgcccaacgccttcgcgccttcccattgtccgtcgccgatcgactggatgccgccgcggtaaacttcggcataaaacgcggccgactgggaggagagcgccagtaccgcggcagcaaacggcgagagcgtcagcgggctgacgactggcagagcgtagtagatccagaagaagtggacgatagcgggagtattacgataaaagccgatcagtatcagcgccggaagacggaagagcattagcggcgaggccttcatcaacgccagcgcaatgccggccagcatgccgaataaaatactggtgacgccgatctgaatggtaccccacagcccctccagcaacagcatgcgatatggccagatggcggcaaaatcccattgatacgacatagttctggaacccctgaaaaacgcaaaacgatggtgatggttttagaacgacatcatcttagcagtagcgaaatgtgataattaaataataaaaaccattgctattatctcttttggttataaatatttacgcgagaaagcaatgccagactctgattccttaaccgctacgctggcgcgttttgccggcgaactcaccccggctgcgataccggcgtcggtgaaagccaggatcgctctgcattttatcgatagcctgggctgcggcgttgccggctgcgaagacagcgtgctgcggaaaagcacgcgggttattcgtagccagtacgcgaccggcagaagcgcggtgctcgacggtggaactccgctctccgccagcggcgccgcgttcctcaacgccgctgcgataaacgcgctggattatgacgatggttttgaagtcgccgggcgggggatggggcatcccggcgccacgctggtggccggggcgctggctgcggtgggccagggcgggctggtcagcggcggggcgttgctgacctctctggtggcggcctgggaaatcaatagccgcgtgattatctctcagcagccgagtcctgaacggtttcaacaagtgtacggcgtgtgccagcacgaatcgctgggggcggcggtggcgtatggtttactgcgcggctgcgatgccgcggggctggaaaatagcctgggactggccgcctcgttaacccctttgcccacgttgcataaatacaactggcaggcgcgtccactggtttcgtttaaggattacaacgcgccggcggcagaggccggcgtacgcgcggtggagctacacctcgcggggatagtggggccgcgcgagatactcgatggtgaacaggggttctggcggatgtcaggctccgaccgttttcagccagaacggctgacggagcatctggcgacgcactggcagctcaggcacgccagtttcaaagactatccggtatgccgctggatgcataccgcgctggcgtcgtttgagcgtctgctggaccgtattccgtcgccagagtcgattgagcggattcgcgtttacggtagttttaccctggcccgttttttcgccgacgcgcgtcccgtcagcaataccgatgcgcagttcagtctgccgctggcgatagcctgcctggcgtttaaaatcgcgcgtcaccagtggagcagcgatcggacgcgcggcgcggcgccactccttgccttcgctgaccgggttgaaatcatcgccgatgagacctttgaacagctgatgctgcagcatcgccgtcccgccgcgcgcgtggacattgtggtaaagggaaggacgatcgccggagagcgtatcgacttcccgccggggtgtgcagaaaatccgctgccggaacagcggatcgtggataaatgcgtggccaacctatcatcacgcctcagcgcgccgcgggcagcgcggctgattgacgctctgctggatatggaacgctgcgcggacattggcgcggcaatctcgccgcttctgtccgcgccaggagagtagtcgcttatttccactcttctttaatcaccgagggcactttgctgatatccacaccgcgtagcttaagggcgtcttcataaaactgtttgctctgtcccgactggtaaattttggcaaactcttcattcagaaagttgcggaagcggggatcgctctctttgcgcagcgcgccgccggtgctgatggcaataatcggttttggcagaatcaggttgcctttgtgcacttttgcctgctgcagagccagcgccgggtgaacgtacgagagggcgtcgacgcgtccggcgtagaaggctgcgacgccttcatccatattggtaaagcgcaccagctgcactttgggtaattttttggtcagtatcaggtccgggctgctgccgagcgtgacgccaatcttaatatccgggcgattgagatcttcccagctctcggccttcacgccgtcgcggatcaggaccccctgcgcataccagaggaagggctggtcggaaaagtcggcggctttgcggcgttcatcggtggggtccagcaccagcatggtatcaatctggccggcctgcagcgcggcgaccgcatttccccaggtggtctccaccggcaccagttttacgcctaaatcttttgccagtactttacccacgttatagccaatgccgttccactgaccggtggctggatctttgaaataccacggttccccctgcgcgacgccgacgcgcagttcgcccgattgcttaatatgatcccaggtggactcttcggcatggctgaaaaaaggcgcggcggcgatcgccagcgacaacagcaatttatgaatttttgttggcatatttttaccctgatgagaaagtcatttctgaaaaacaacgtattacgcgaacacgataacggagtttgttatcagtgcattattattttttggtttaactcatgcccgaatgttatttgctgatacctaaccggtttcgcttaaattacggcgcgttgcacatattattcataacttaatgcgctattgttctaaggtgctttatttccgtcgccgaatttaaaaattccgatctggtgggagtcatagtttgctgggacgttaaaaatatcacttctgacagccaggcttataaaagagcgacaataattgccagacgagcgcgtccccggcctgaaaatgatatcgccgcgtccctcacgcagcgtcaggcgctagagtgcagaagataaaagcggctctaccgggtaaatttccctatccacgggctgcttgtatcctgtgaccagagttgtaatagcatctccctgaacttttccgctgcagggctcagcgccgtttctctgcgcagcacgagaccgagcgtgcggcgaataaccggctcaacgagcggacggctgacaagaatgtgatgctcatcggtcggcatggccagactgggaaccaccgccacgccaagccctgcctctaccatacccagcgacgtcgacagatgcctgacttcatagaaccagttgggcttccagtccatattctccagcgcttgatcgatcagcgagcggttaccgcttgaacgtctaacgccaataagcctgaagctggccaggtcttcccacaagatcagcgatttctgcgccagttcgtggtctcgtcggcaggctaatacgaaaggttcattgaccagcggcgagaaatcgatattgggatgtgtgatgtttatcatgtttatgccgaaatctgcgtcaccgtttaagacggcttcaagacaatcgctggcgctatgctcgaggatgcggatacggatattggggtagtgattgttatagtccctgatgaccgaagggaggaaatagaacgccgcggtggggaggcaggacagggtgacaacgccgctttgatgggtggccatttctttaatactcaggatcgagctttcataaaaatctattaaattctttgccttaggtaaaaactctctgcctacagccgtgagtttaatgtttctggttgtccgttcaaatagcgtagctcccagctgctcttcaagttttttaatccggcgggttaacgccggttgggatgtgtgaagaaaatgtgatgctcttgtgaaacatccaatttctgcaattttaacaaacgcttgtataccttgaagatcgtgcagcatgagatttcactccagactttatcgcgatgcaaacacactaacctaaccgctatttatacgcaaagcgtattaatcgatggttttattggcattagaattatgtattcgtctgtggaatcctgacattgctcttatcaatgcgtgaaacgagaaacataatgttaaagattccttgtgtactgatgcgtggcggtacttcgaaaggcccggtgcttctggccagtgatttaccgacaaaaattgaagaacgcgatgctgtgctgctgggcttaatgggcgcgggtcacgaacttgaaattgatggtattggcggcggcagcccccaaaccagtaaagtcgcgattgttagcccctcggacagtccggatgctgacgtcgactatttatttgttcaggtgatggtcaacgagcgccgcgtcgataccacgcctaactgcggtaatatgctctgtgccgtagggcccttcgcgattgaaaaaggcctggttaaggcgcaaagtccggtgacgacagtgcgaatccgcaacctgaataccggtacgctggttgatgcggaagtacaaacgccgaatttttatgtcaactatgaaggcgatacgcacattgatggcgttcccggctgcgctgcgccgattggcctgactttccttaactccgccggatgcaagacgggaaagctgctgccaaccggtaacgtcgttgatgtgattgatagtgtggaagtcacctgtattgatatggcgatgccgatggtgctgattagggcagagcggatgggcaaaacgggagacgaatcaccggccgacctcgatgccgatcgcgcgtttatgaataagctggaaacgatccggcgcaaggcaggtgcgaaaatggggctgggcgatgtcgccgataaagtgatccctaaaccggttctgctgagcgcgcccggcgcaggcgggaccatcagagttcgttattttatgcctcatacttgccataaatcactggctattacgggctctatcggcatatccacggccacgataattgaaggatcggtggcccatcacattgtggccgaccagccgaggacgccgtataccaatattattaatattgaacatcctagcggaaaaatttccgtatctttactcaaagagggagatgatattgagaaaacgcgtgccgcagtgattagaacctcccgtaaattatttgaaggcacggtttgcgtcccggaatatgttttagtggaggaattataaatattttatatcattaatgcggtgcaatactgatgtcctctcgcgtgtagttgctacataactctgtacctaaaaaaataatgtcgaggattttatggctataacccatacgaaagataatcagcttaattctgctcccgtcaaggtcagtaattatattcggatcatcctggccctggcgctatccggccttgcagaattagcctcactcttttttattcaacctctgttacccgttctcgccgtcgaatatgatgtgccggtgagtcaggtgagtatcattctctccgcagaaacggcgcttctggctatcggattattattcaccgggacgctgtccgatcattacggcaggaaaaaattaattatcgtttcgctgctacttggcggactgctgacgatgctctgtcctctggtcgaatcatgggcgatgctggtggccctgcgtgcggttattggcctggcgctcagcggtatcgctgctgccgcaaccgcctatatcagcgaggaggtcgcgccggtggtggcgggggtggtcaccggatacttcgtctttggtaactcgatgggagggatgtccgggcgtattgtggccagccagctgatcgaccatatctcaataaataccattttctatggttttgcgatcagcctgattttggtggctttgttggtttactttttactcccggcgtctcagaactttaagccaacgcaaaacctcaacgttcttcgcgtggtgaaaggcgcggcatctcactttaaaaataaaaagctggcgttagccttcgtgattagcttcatcatctttggggtattcacctctctctataactacctggctttcttcctgaaaggcgaaccctttcatatttctccggcgaatgcgggcctgctctcctttagctttgccttaagcttttttaccgcccctcaggcgggacgactttccgcaaaatacggcagtatgagagtcctgcgcgcgctgtttgtaatgatggcgctgggaatgctgctgactttaacgtctaacgtcgtcacctttattatcggcgcggtcatttttaccggttgtttctttggttgtcactccattggcttaagctgggtaagtaaaaatgcaacgcatgcacgtggccaggccgtcgcgctgtatctgttcttctactacatgggcggctcagtgattggtttcgtgaacggctttgttttccactctatgggctggcaggggatgacgggattcattattgcgctactggccgtgggggcggtggttgcaacgtatttgtcttccagcgaaacaaaagtcatggttccggttgagtcttaaacccttcgtggcgaagtgaatgactcacgtcatctccagtggcgtgagtaaagaaattcaatgttagtaaggtgtcatcatgaaattagcaagctatgttcatcatggtcgtaagagttatggaatattgacggatacaggcattattgacctgggtggcaagattggtcatcaatatcgtacgctgaaggacttactgcagtggggcgctattgagatcgccggccaatatgttaattatccggtcgatgtcatgatggctgatattacttttttaccggtcattgaaaatccagggaaaattttctgcgtcggtatgaactatgcggaaaaaagaaaagagttttctgaaaccagcgatgcgccgaccctctttattcgttttcctgactcgcaaaccggtcatgcaacaccgatattaaaacccgcgctatccaatgaatttgattatgaaggtgagctggccgttattattggcaaaccgggtatgaatatcgatactggcgctgccctgagccatgttgcaggctatagctgctatatggatggatcggtgcgcgactggcagcatgcctggtttaccgccgggaaaaactggcggcagaccggcgcgtttggtccctgcctgacaaccgttgatgaaatacccgatccccaccgcttgtctattcaaacctatttgaacggcattatggttcagaatgattcgacgagcagtatgatccataaagttgccgatctgattagctatatcagtacttttacggcgctcagcgccggcgatgtcattattaccggctctcctggcggcgtcggtaaaaaaagaacgcccccactctttatgcacgaaggcgatcgggtcgaggtggtaattgaaaatattgggcatctcatgaatacgattgtcgaatcaaaaccgcagcacgaattgcagatgtcgtcgtctccgcgggctcagacaagattatttgacgctcattaaggtatgggcaggagaaacaagatgtacaccgaccaaacgctagaattcgagaaagtggaaactagcaacggtaccttcagagacgaaattattctctttctgaagaacaatggattaggcatcgacggcgacattgagcaatttgttgtcgcgcgctgccagcggcagctggttgcctgcgccgggcttgcggggaatacgttaaaatgcattgcggttgccagagagtggcgcgggacggcgttaggcctgaaaatcattcatgaagcggagctgcaggctgttcagaacggcgaacatcagctttttctcctgacgtgtccggacaatgtgcggtcgttccagggatgcggattttatcctttggtcaccctcgataacagggcgacgctgatggagaattcgccggttggcatccatcgctactgccgccaactgcggggccagcatttggtgacggccggaaatatcggcgggattgtgatgaatgcaaatccctttacgttagggcaccagtatctgattgagcaggctgcaaaagcgtgcgactggctgcatgtctttgtcgttgaggaagatctgtccacgttttcctttcggcaacggtttgccatggttcaggaggggtcacggcatctgcctaatattacggtccatcctggctcaaaatatattatttctcgaggaacattccccggttactttctcaaagaaaaacaaattattaacgaggtgtatgccgcaatcgatttgcttatgttccgccgttacattgcaccggctttaaatattaatcagcgttttgttggtactgaacccttctgtaaggtgaccgcgcaatataatgacgcaatgcatcactggctggaggatgagatgacaatacctgccgccagtatcaaggtgaatgagattcagcggatgaccgatatgaataatcttcccatctccgcctctgcggtcaggaaattgttaagtcacgaagatatgcacaccgttaaaagtatggtgcctgcaactacgatgccctatttatataaatggttatcagcgaatcaatctaagcagcccgatttggatatggttgatgcttaataaatcattgttcaggatatttatatgaaaatattacatgcggcaatcgccgggacgctggaatccagcgacctggttgtcaaagtcagcccctacgatgatgggctcgatattactatcaacagcgaagtgtacaaacaatttggtgaacagattacggcagtggttaatgaaacactttccgcattaaacgttacgcaggggcaaattattgttgaggataagggcgcgctggactgcgttatccgcgccagaatgcaggcggcgattttacggggaacggccagcaacgaaattgcgtgggaaaaattatgatgaaaaaattacgccgtagcatgctttttttaccgggttcaagcgccgctatgctttcaacagcctttatttataaacccgattcaatcatgtttgacctggaagatgcggtctcgttgaaagagaaagacagcgcgcggctgctggtgttccatgcgctacagcatcctatgtataaagatattgaaaccgttgtcaggattaatccgctgaatacgccatttggcttaaaagacctggaagcggcggtgcgcgccggcgtcgatgttatccgtttacccaaaaccgatacgccggaagatatttaccagcttgagcgtgaaattgtgcgtattgaagagagctgcggccgcccggtgggctctacgcagctgatggcggcgattgaatcggcggtgggggtcattaatgccgtcgctatcgccaggtcctctcaacgcctgatggggattgcgctggcggcgtttgattacgtcatggatatgcaaacggaacgcggcgacggtaccgagctgttttacgcgcgctgcgcggtattacatgcggcccgcggggcaggtattgatgcgtttgacgtggtctatgccgatattaatgacgaggccggctttttgaaagaagtggatttgattaaacgtatgggctttaacggtaagtcgcttattaatccgcggcagatagagatcttacataatgcctatgcccccactcaggaagaagttgattacgcggagcgtgttattgccgcggccgaagaaggggagcgtagcggacttggggtgatttcactgaacggcaaaatgattgacgcgccgatcatcaaccatgcccgggtggttattgaacgtaaaaatgcctccggcatccggcaataatctccattcagtcaccagcaacaggatttaactatgaatcaattaaccgaagcccttcataatatatccggcgcccagcaccagtatgaggtattttccggcgcaaatacccatacgccctatcttgcggatacccggcaaaaatatcagcgcaaactttttgacacgctggatgaagttttatcgcgctgcgatttacgcgatgggatgaccgtttcatttcatcacgccttccgcgagggtgatcaagtgattaactacgttatggccaggctggcggaaaaaggcctgcgagggctgacgctggcgtcaagttccctgatgacctgcaacgcgccgctgatcgagcatattaaacacggcgttattagcaaaatctatacctccgggatgcgcggtgaattagcggatgcgatttcacacggcctgatggaggagccggtacagatccactcgcacggcggcagggtcaatctgattgaaaagggtgaaattaatattgatgtcgcgttcctggcggtctcctgctgcgacgaatatggcaatgccagcggcagcggcggcaaatcccgatgcggctcgcttggctacgcgatggtcgatgcaaaatatgcccgcaaggtggttttgctgacggaaagcattgagccgtttccgtatatgccggccagcattattcaggatcaggttgattatattgtcaaaatcgacagcgtaggcgacccggcgaaaatcagcgttggcgccgcgcgcgtgaccagcaatccgcgagagctgatgatcgcgcggtctgctgcggacgtcattgagcattccggttattttcgcgatggtttttctctgcaaacgggatcgggcgcggcgtccaccgcctgtacgcgattcctggaatcccgcatgaggaaacacaatatcgtcgccagctttgccttaggcggcattaccggcagtattgtcgatctgcatgaaaaggggctgattactaagctgctggatacacaaagttttgatggcgcggcgggggagtcgctggcgaaaaatccgcaccacgttgaaatctcgaccagcgtttacgccaacccggcggcgaaagccgcctgctgcgaccgcgtggatatcgttatcttaagcgcgctggaaattgatacggattttaacgtcaacgttctgaccggctccgacggcgtgatgcgcggggcatcgggcggacattgcgatgtcgcggcggcggcaaatttaactatcgtggtcgcgcccctgatccgcagccgcattcccaccgtcgtcaggcacgtcacgacccgcgtaacgccgggagagagcattgacgtgctcgtcaccgaccacggcattgccgtgaatcctgcccgtccggaagtcaaagagaggctgacggcggccggtttgccggtcgttgacatcgaagcgctttatcagacatcgctggtaatttctggcgagccgaaacctattgagtttacctcgcgcattgtcggcgtcgtgcgttatcgcgatggcagcgtcattgatgtggtaaggcaggtgaaagaatgatcggcgaaacaacaaacgcttcctgcgcccctctcacccttgaggaagtcctcaaagccagagaagcgcgcgcgagtgtacaacaggcgtggctgcgccgcttcgaacaaccaatggtatccaccacgctcgtctggcccggagaggtaaaagatacgccgcttgcccggcaggttatggcggaggcgacggacgcgttcagccagctgctgcggaaacatcgctggggcgtttccagacacgacgttcgttttcagcccaccgggcccgaagcgttctggtctgtagcggcgccagcctggatgatcaagcacgtgacggcgcatcttgaagatcatcatcctctcgggcgtctgtgggatatcgatgttttttgtcccacatccggattaattaagcgcagcgcgatccgacagccgatgcgcaaatgcttcatttgcaatgaggctgcccacgtctgttcccgtatgcgccgccattctcagaatgaacttgcgcaagtgattgaggatttagcctatgactattttcgcggtcaacgctgaacgggctgagcaacgggaaagcatcgcctggctggctgccgaggcgatgtatcgggaagtgagattaacgccaaagcccgggctggttgatggcgagaacaatggcgcgcatcgtgatatgaacatcgccctgtttatggccagtattcgcgccgtctcgccctggtttccgcgcttttttgcgcagggaaaggcgacggcggatttgcctgccccgcagacgctattggcgataaggcccacaggactggcctgcgaacaggcgatgtttaacgccacggggggagtaaacacccacaaaggcggcattttttccctcggcctgctgtgcgccgccgctgggcgccttgttaagcgcaaccagatgcttagccagcgcaatctgtgcgaggaaacccgcgcgatgtgcgcgggcctggttagccaggaactgaaaagaaagggcctcgccaaaaccaaaggcgagcatatttttcagcgctttgggcttagcggcgcgcggggtgaggctgagaacggcttttataccgtcaggcagttcgggctgccgcagtggcagaaagcgcggcgggagggggtatctgagcaggatgcgctgctcaggatgctgctggccctgatggccttcaaccccgataccaatgtggtgtcccggggcgggctgagcggcctgcagtatgtgcatcgctatgcgcaacgcgttctgaagatagaacacctggcgggtgaaaagctcagaaaagcgctgagacacatggataaggcgttgattgacagaaatattagccctggcggcagcgcggatctccttgccgttggctgggtactttcccattacccggcctgacgggcggtactgaacgtggagaggaaggctttatgactacccaacgtctggaacagctcagcgagaagttgacgattattctggtgccgggcttgcgagacagcgatgagcatcactggcaaagctgttggagtcgtcgttttcctttttggaagcggataagccagcggaactggctggagccggatatcgatgcctgggtatccgctatccgtcgggagctggctacctgtcagcggccggccgtgctggtcggccacagctttggggcgctcgccgcatgtcgcctgattcagacgcaaaaggtgaacatcgcgggtatcgtcatggttgcgcctgcggagccatcgctcttcgaactggacgaggcggtacttcccgagaggctgcgggtgcccagcctcctgtttgccagccgaaacgatccgttaatgacctttaagcgagcgcagtactgggcgcaatgctggggagggtggttaatcgatctgggtgacgccgggcatattaatgctgagtccggattcggggagtggaattatggtctggagcagttagcagaattttgtgaaggcttaccgcaatttattaaaagttaattttaccaaccgaatatcgctattacataaacaaccttcagataaataacatctgaaacggagagcatatgttagaagcttataataagcatgtggacgaacgtgctgaaaaaaatattccaccgaagccgttaaccgctgagcaaacgcaagaattaattacattactgaccagcaagacctgcgatgataaaaatgcccttgtacagctgttagcgcatcgcgtgccgccgggcgtcgatccggcggcgaagattaaagccgattttctttatcagcagatcaaagaagaaaacccggcgagtattattgcgcctcagcaggctattgaactgctgggtaccatgcagggtggttataatgttcaaccgctcattcacttactggacgatccccgctgggccagcagcgcagcggaacaattaagcgccacgctgcttatttttgaaaaatttaaggatgtggaagaaaaggcgaaacaaggaaatgcctgggcgcaaaaagtgattcagtcatgggccgacgccgaatggtttttacgtcgtccggcgctgccggagaagatcacgctgaaagtattcaaagtgacgggggaaaccaatactgatgatttgtcccctgcgcccgaggcatggtcacgtccggatattcctctgcatgccttgtccatgttgtgtcatccgcgcgacggcgtcagcccggatgaaccgggaagccgcgggccgatacgacagctagagcagttaaagaaagagggctatccgctggtctacgtcggcgatgtcgtcggcaccggctcttcgcgaaaatcggccactaactctattttatggaaccttggcaacgatatgccatgggtgccgaataaacgaagcggcggctttgtttttggcggcaatattgcgcccatcttttttaataccctggaagattccggcgcgctgccccttgaaatggatgtttccgcgctatccacgggaatgctgattgatctctatccgtatcgcggggaaatttgcgaagcccacagccagcgtcctgtcacctcattttccctgaaaacggacgttctgctggatgaagtgcgcgccggagggcgcattccgctgattattggccgcagcctgacggccagagcgcggcaatcactgaaccttgcgccctccgacgttttccgccggccgaaagcgccggcaccctccgccgctggctttacgctggcgcagaaaatagtggggagagcctgcggcgttgccgggatccgaccaggacagtactgcgagccgcgagtcaccaccgtcggttcgcaggataccaccggaggaatgacgcgcgatgagcttaccgatctggcctgcctgaatttttccgctgatttggttatgcagtctttctgccatacctcggcctatcccaagccggttgatgtgaagctgcatgaaacgctgcccgagtttatcagccaccgaaacggcgtggcgctgaagccgggtgatggcattatccactcctggcttaaccgtatgctgattcctgataccgtggggaccggggcggattcgcacacccgtttcccgcttggcatctcttttcccgggggctccgggctggtggcctttgctgcggcaacgggcattatgccgctggatatgccggagtccgtactggtccgttttacgggagagatgcagccggggataaccctgcgcgatctggttcacgctattccgctctatgcccgcaagcagggattactgacggtggagaaaaaaaataagatcaatattttctccggccgtatcctggaaatcgaagggctcgggatgctgaaagcggagcaggcctttgaactggccgacgcctcggccgaacgctccgcagcggcgtgcgtgctgcgtctggaagaggagaacgtggcggaatacctgcgctccaatgccacattgctacgctggatgattaatcagggttatgaaaatgccgacacgctggcgcggcgaattgcggaaattgaggcgtggctggcgaatccgtcgctgctggtggccgatgagaacgccgaatatgccgcggtgattgagatcgatctcacggaaattaccgaacccatcgtctgtgcgccgaacgatccggatgacgcccggctgctgtcggaagtcgcgcgtacgccgatagatgaggtctttattggctcctgcatgacgaatattggccatttccgcgccgccggtaaaattattgccgacgcccgcgagatacccgtacggctgtggctggctccgccgacgaaaatggatgcgcgtcagcttgccagtgaaggctactttaatcagtttataaaaacgggcgccagaatcgaacccgccggctgttcgctgtgtatggggaaccaggcgcgggtacgtcagggcagttccgttgtttcaacatcgactcgtaacttcccgaatcgtctgggcaccgatgcgaacgtttttttagcatcggcggagctgagcgccgtggcggcgatgatagggaaaatgccgaccgttgaacaatatttctggcacatggataaaatcaaagcatcaagggacgatatttatcgttacctgaacttcgatcggctgccagagtatcagtcaacgaatgatggaaaaaatattattaaaacattcgctggctaattctttactgcattaagcaataacggtgaatagctcacttgttcagcggaagcttcagaagaaagaggcttctgcttttaatgacacggattgtagccgaggtgaagcatgttgaagtcaaagctaataaaaatagcggtgcttatttttattattatattagcaatcatcattccaccccccgagggattaacgaaagaagcctggatactggccggtatctacctggcatccattataggtctggtgagtaagccttatcctgagccggttatcatgctgtcggcggtaggcttgtcgtgcttaacggtggcacgatttgatgactcccccgtcaggtcaatggatgtactgagcggtttttcctcgggaacgacatggctggtatttagcgcgtttactttgagcgccgcttttgtcaccaccggattagggaaacgtctggcgtactggtttattttaaagttcggtgggacaaccctgcggctggggtatgtcacggcgctgttggatttaatgctgtcaccggcgacgccctctaacaccgcacgcgccggcggcgtcgtattcccgattatcaatagcattgccctggtgttaggttcaacgccaaaagagagtccgcgtcaggccggacgttatctgatggtgaatatctatatggtgactaaaaccaccagctatatgtttttgaccgcgtttgccggaaatgccttagcgttacagttaatttccgatatttttcatatccgcataagctgggtagggtgggctctggcgggggtaccgcttgggctattgatgttagccgtcattccttatatcacctacaaaatagtgcgcccgcaattaaaagaaatagacaatgtaaaaatagccactgcgggcctgaatgacctggggcccatcagttcgaaagagaaagggctgatcgtggtctttatctccgcactctctggctggatattttctcattatctggggctgaatgaatcctccgttgcggtgattgccatggctggcgctttgctcacgaatgtcatttgctggaatgatgtgctgcaaaataagggcggctggaatacgttaatctggtacggcggcattattggactgagtgcgaccttaagcaaagagggattttttaaatggcttgccgcctttatgtccgagcatctggatttcctcggcgccggtaacacgaccattgtgattattgtttttttaagcatcgtcgtgcgctatttattcgcctccggcggtgcatacgtcgcggctatggttcccgtcttcgccaccgtcggactggttaccggaacggcgcctgcgctgctggcgctcgccatcctgttttctaactcttacgggggctgtatcacgcactatggcggtgccgccgggccgattatctttgccgccggttataacgatattaaatcctggtggttaaccgggaccataatcgctttattaacgtttctgctgcatatggttgtcggcattccgtggtggggctttttgattcagcacggaatactctgaggccagccttgttttttattacctgacggctcgcgatataacgaaaaaaccccgacatgatgtcagggttttttaactggcgtgagtccatcatcggcagcgaagctgaaatctaccgccagcaaataaagcgcagcttagatggcgaagacgttaccggcagaagggcctttctggccatcttcaatggtgaattcgactttctggccttcgttcagggttttaaaaccgccgccctggatagcggaaaaatgtacaaacacatctttgctaccgttgtccggggtgatgaaaccaaagcctttcgactcattaaaccattttactaagccagtcattttattagacattgataatacctcaacatatctgagccttacggcgaaaaggtttcgcacagaatctaattaataacgataaggagactcaaaaggaagaattatcaatggataacacttaagatgaggactgctttactgaaccgctttattatgtctgtgtacttaaccgaccaatcattagtcacatacttcaccgcggatagcaagacttatttcaattgatattgccggggcggagagtgatacgggaagagagggagtgattcaccagcgacttgctgatggcgtaatgataataactttcactatttcattgggttaactagatttttggttacggtgacgtggatgaatctgcaagaatgtttttttatttttccgaacaggctcacccggcggtgaagccatatcaccggtcgcagcgcgattaatttaggccgtttctcattatttatccccatcggggtatctggacggctaaaatttcatttgcttattaatggtattcatgccttaatgaaattattaatccgaaaaaacgcatgcacttaaaaattttaccggcccgttctcattaccaggcgctatcgctgatacccctttcttttgagtccatacgtttaatccgacacgttttctgtcaattacctgatgcgcaaggagtcagtatgtcctcaagaattaaaggtctggtcaagtggtataatgagtcgaagggatttggtttcatttcacctctcgatggcggtaaagatatctcggtccattgctcggcgctgcgtggtgataattttaataccctgtttgaaggccagaaagttgaatatgccatcctccatagagatgacaaaggccctgccgccacccatgtcatactgtgcgataaataacgatttatagcgttacgcccgcgatagcgaaagccgtgctggcgatatcacgacggcctgtcccaggattattcctcccttattccatgtcctgtccctgagcgcaacgacagccgcgttgcgtacggtttttcttatccggcgatgcggcagaaatgcgttcaacggattctggaagcgcgtacaattcatcggctttcagtcagtatttaaatccgatgacaggggatggtgatgatcagacgctttttggtgtgtttcttcatgctgtgcgcatgctcagcctatgccgctaacggcgggaatggcggcgacggcgggaatgggaataactcggatgggggcaatggctctgatggcagcgcgaccgcgtctggacgcgatggttgtcccggcggaacgcagcctgactcgtccggaaaattttatcttccaggcacaaaagagccgtgcaatccgggcaggcaggatgccatgaaaagcgcgcgccattagccttaacagccgctgtttagcggctgacgacaagaccgccgaacgagtgaggcaagcgagtctaaagcgcggcgacatcctttcccttaacgcagcgtaaaactcgtcttgtcgttccagctgcgctcgtaccaacctcgtgctatttaatatggcgcggggtgttttcccctttccgacgttgtttaatgcaccgcgtaatcatgacgaaaaagacggggacaaagaagatagccagcaccgttgcgcttatcatacccccgaagacgcccgttcccagggcatgctgggtcgtgtcgctcgccccgctggccagcatcagcggtacgacgcctaatgtaaatgccagcgaggtcatgagtattgggcgtaagcgctgcgttgaggcgagtaatgttgcatccaccacgttcattccctggctcatcagttgtctggcaaattccacaatcagaatcgcatttttagcggaaaggccaatcagggttatcaggcccactttaaaaaagacatcgttggtcatattcgccaccgtcacggccacaaccgcgccgagcaggccgagaggaaccacaagcattaccgcgaagggaatcgaccagctttcatagagtgcggccagcaccatgaatacgaccagcaccgagagtattatcagccccggcagctgtgacgcggactgcttttcctgtaacgaactccccgcccattctccggcgaaacccgccggcaactggtccgccagcttctccatcgccattattgcgctacccgtggactcgcccgcggcggcgcttccgctaatgcggatggccggatatccctgatagcgattgagctgctgcggggcaacgttccaggagagcgtcacaaacgccgccaaaggaagcatccgccccgagcggttcttcaccgacagggtcaataactgctccggttgcatacggtagggcgcatccgcctgaacgatcacctgttgaacccggccattattggtatagtcattgacgtaactggagcccgttgcgacggtaatcgtttggttaatctcatcaaacgatacgcccatcgcttccgctttttccctgtcgacgttaagcatcaggctactcccttcagggagcccatcgatatagacatcgttcaacaggtgactctggttcgcacgctttaccagctcatccgctgcctttttcagggccggatagcccttgccgccacggtcctgcaaataccaggtaaacccggatgaggtccccatgtcggagatagccggagggagcaggctcatcgtgacggcatcgggaacgctttccatactgctttgaatatactctgcttcaccctgggcggtcgcgccctcgcgatttttccagtccttcaaggtggtgaaagccatggcagagttttgccctgagcctgaaaacccaaatcccaggatcatgatgttgctttcaacggcctgccgcgcggcaatttcatcttcaaatcgttgtaccaccttaagcgtacgctgcatcgtggcgtcggaagggagctggatcgacgacataaagtaaccctgatcttcatccggtaaaaatgacgaaggtaatgaggatagaccggcatacagcgcgagacagagcgcggtatacagcagcatcatgcgtccggtccgtttcagaacaaacccgagcccggaggcgtaaaatgaggcgaggcggtgaaaacgggcgttaaaccacgcggaaaaacagccgcctttgctccggtcaggctgatgcggccgaagtaacgtagcgcaaagggcaggggtgagcgtcagcgccaggaatgccgataataaaatggatactgccatagaaatgcagaattgccggtaaataatccctaccgacccgtcggcaaaacccatgggaataaataccgcggtcagcaccagcgtaatacccataatggccggggtgatttcactcatcgcttcccgcgtggcctgcttcggggagagccccttttcttccatgaggcgctcaacgttctccacaacaacaatagcgtcatcaacaatgatgccgattgccagcaccatgccgaacatggtcaggatattgatggaatagccgctaaacagcatcaccgttaaggtgcccagcagcgccaccggggctacgattgcggggataaacgtgcagcggattttgtgcagaaacagcagcataacgagaaacaccagcaccattgcttcggcaaaggtttccaccaccttcaaaatagaaagcttcacaaagggggcggtatcaaacggaaccgtgaacgccattgcttcaggaagcacgcctgaaagctccgccagccgcgcgcggacccccgatgccgtgccgatcgcatttgcgccgggagagagctgaatagcggcagccgtggcgggaacgccgttttctcgtatgccaaaagcatagctttgtaacccggactccacgcgcgcaatatcagccaactttagccgtgcgccagtcacctcagattttaaggtaatgttgcgaaacgcctcaaccgatgagagctgacctttaacggttatcggataagtaacggcctgctgcggcgtcgttggttcatctcccgttctgccgggagaaacaatcacgttttgttggccgacagcgctcaccacgtccgtgacggaaagcccgtaaccgtggagctttataggatccagccagatacgcagcgctttttccccgccgaagagctggactttgccaacgccagggacgcggcgcagctcatcgatcacattgcgagcaaaatagtcgcttaaatcagcctcctgatactctcccgtcggggattttaaccccaccatcatcagaaagccggaattggccgcctcaaccgttatgccattttgccttaccgcctgtggtaaacgcggctcgacgattttaatctggttttgcagatccatctgcgcgagcttaacgtccgttcccggtctgaaggttaccgtaatggaagccatgccggtggtatcgctggtggattcaaaataaagcaaattatccacgccagaaatctcgcgctcgataagtgaaacaacagacgtattcatcacatccgggctggcccccggatagctgagcgaaataataatgcccggcggtgcgacggcaggatattgcgcaaccggcaggcgcggaatggacaatattcccgtcagcacgataaacagcgcgaccacccaggcgaaaataggacgttcaataaaaaagtgcggcatcagatagacatccagtcaacaaacaaaaaggtcagtaaattcaggatgaccgctcggtttcccggggcctatcctccggtaaactcgtgcgatagcgtcatccaggcggcaacgttcgagcaattgtctcctgcgcgaatggcatatatcgccatccggccagaacgaggccgaggaggaagaggctaagtctaaatgcgcgatgttgaccgccaatggccgatttatggagggagtgtgtatgcatattcccggttaatcttatgaacgcggctgccgcactcggctaaagagggctatctttctcatggcctaaaatcaaattatccgcatcaataaatacgccggagaaccgcagaaaacgatcagcaaaaagcactcataataaaagataatatcatatatgtcgggtatgatattcaaaagtatattaaatacaacaatgctataaataaatattaataccagccagaagacgataatcgctaattctcttaacgcgccaggtttcttttggaatataaacgccaggactgagaaggtgatgctggcatggaccaatggcgatgacagcgtcgtggaagctaccttttcatcaatggcatgtaccaggtataaccataaataaagtaacgcccatgctgtcagggaaaatataaaggcagcgagaactttttcacgacgaatattacttaagctttccataatgttttctctgacaggggcccacatcagttgcctggcgagctgaattctcaggcgtgcgtgtcacactcacgctttcacttttcttcctcgatgaaggattgtcgcagcggtatgttgattgtttatttcgtgattgtgtagccagtatggagacgcgttccgcgtgctttatatcggcaggaaaaaatgcggcgtgtgcaactttttaactcctggcttgtcacattgcttttaacagggaaaatatccactcgcggctggtgcctgagattaggttgtagaatgtttaaacaagtacggcataaaatctttttaagataaaataaaatctattatcggtaatgtggaaactaaaatgaacaaaagcaatctgataattatcgccgaggatgacgatgaaattgccgctattctgacaggctatttacatcgggcgggaatgaaaacctgtcgggcggaggacggcgagcaggcgataaatcttacccgtctgcataaaccggacctcgtgttactggatatccatctacccgtttatgatggctggaacgtgctgacgaccttacgcaaagagactaacgtgccggttatcatggtgaccgcgcttgatcaggacgtcgataaactgatgggactgaggctcggcgcagatgactacgtgataaaaccgtttaatccctccgaggtgatcgccagagtggaagcggtactccgcagaacccggccgaatgccgaagtcgccaattcaaggccattaagattgccgtttctgaccatttatcccgatgaattttatgtggaaattaccgtcgagaataagattgtcaccccggtgttgaccaccaccgaatttaagcttttgacctacctggcgcgcagtccgcgaaaggtgtgctcacgcgaagagttactcgatgcctgcctgcccgagggggattcacttgatcgaaccgttgatagccatatgagtaaactgcggaaaaagcttgaacacgcggggctcaaaggcatcccggagagcatcagaggagtgggctatcggttaggtgagaaaaaatgaacaaagaaacgattctgagccgtcagatattgacctatatgctgtcgttaaccttcattattatcgctatcgccgtggtgggctcttatctattttatagcttcttgattgactacctgccgggaggcgccgtctccgggagcgaagatgatatgaccttgctggactggctgtggatcatgatagcttcagtcaccagtctggtggtatcgctgttttttaccgtgaaactctctgccagaatattgacgccgctaaatgccgttgcccagagcctgaaacaaatttcgcagggcaatcttggcgcaagagcgtccggaaccagctctcagctgggcgagattaataatcttgttaatgatttcaatgaaatggcggaaaagctgcagaccctcgacgttcagcgaaatctgtggaacgcggccatcgctcacgaactcagaactcccgtcactattctgcgcggaaggcttcaggggctggtcgaaggggtgtttgagccagagcccgcgctattcagaaacctgctgagacaaacggaaggcctgactaatttaatcgaggatctgcgggtcgtaagttcctccggcggcgccggctatacgctgacgctcagcgaggtcgatctcgaagcgacgattaccagcgcgcttgacacttttttaccggagtttcgtagcaagcggttcacccttatcactgaactcaagcagcagttgtgcgtttgcgatcctttgcgtatgacgcagtgcctgacggtactgttcgataatgcgttaaaatattccacctcccgaactttgctggtaaagaatggaacctctggcaaagaaaattatattctggttcaggatcgcggtcccggaattcctgaagaactccagcggctgttatttgaaccttttcagcgcggagaatatgccagacatattaatcctcaaggctgcggattgggattatcggtcgtcaaagcgattatgctcgctcacggcggcagcgtgagctatcggttgtcacgagaaaatcactcgatttttaaattatcatggcccgtcaacctgccctgacaaaacaggctcaattgagcctgtttctggagacatcagtgccacatgtccccgagcttagcatcccatatcgccggtgtgatattaagtttacctcgcttcggacttaatgttatttcactgaaatagatttcattttcttttagcatcagatcgacacggcagtagtcaatctcttttgccaattcctgcgcggcagtgacggcgcgatgaaaggattcgggttcaggtaccggccccggcgtgtttggatattccatctgaaaaggctgcagccgccacgatctgtcatagacattaatatattcgcgcccctgtttatcggtgaaatcagcctccacaaagcaggctaccccatgaaaacagtgtattcttaacatttcaggcgtaacgttcttatctcggtcagaaaataagtcgataaacatctcacagagaataaccggggcaatatgcttatattgccactctcgggttgtgtaatacatattctttttgagcgccagcttgagtcggtttaaggtattggccggattaaaattgtctctgtcggtgcatataacggtgctgccgcagtcatgattgcacttcaacacgaattttgccgggagtctgctaaaatcaatatcctctgcgcggtggtaaacgccaattaacggtatcacctgcacaagctgcgttcgtgtacggacatattctctgaccgccagtttgtcggccagcagagtataaagggcgttatgatcgaagacgaggcggtggcatatcttctcactcagcgtgataggttttttgagattggcaaaggtttgcgacgctttgttgagtttggcagtatgaaagtaaagatccgaagtcatcattccccggcattttctgaataagtattcgacgtatttaagagagtagttcagcttgttcatggttcctcctgagcgtaatgaatattctgacgaaggaggattgagtgatattgttcagattatggagtggagatggagcagactggctgtggcgtgaaataacaacgcgtccgcggctggcgccagtaagaacgggcttttagcgaatcggtaaaaatacctttgatacggctacgctgggcggtaacaacagcatgtcagaagggttgtcagttttaacttaaataaggatatcggtatgagtcagatggtacggaaaaattaccctgaactgggcgaggtcaaggcaccctacgttcattcggttaagcacgggaacacgctctatatttcagggctcaccgcgtttggcacccgtgcgcagcaggccggtattggcgcacaggcggaggaggtttttacgcagatacgaaccgttgcccgcgccgaaggcatcgatttttcctctcttatcaaagtcacgatctttatcacttcttttgatgagatcgacgagttgcgcaaagtgctttaccggaactacggcgatcatctacccgccagctcgctcgtagaagtcagccgcctgttttctgcggatctcaaaattgaaattgaggcaatattcggcctgtgagccagtgtttattgcccgggccgcggtctgcgccgccgggcagactcaatcaatttatttgaagcattcggttaaacaaacgatatttattctcaccgggttatgcgtagagtagaggcataacgcggcagacacgtttttcattatgcgccacctgccaacgacctccctgcaacccaggacacccacgtcatgaaaaagattggctttttgtcatttggtcactggacgccgtcgccgcagtccgggacgcgttcggccgctgatgcgctgctgcaatccatcgatctcgccgttgccgccgaagagctgggcgcggatggcgcctatttcagggtgcatcatttcgcccgccagcttagctcgccgtttcccctgctggcagcggtcggggcgaaaaccaaacgtattgaaatcggcaccggcgttatcgatatgcgttatgaaaacccgctgtatatggccgaggatgcgggcgcggcggatttaatctccggcggccgtttacagctgggtatcagccgcggctcgccggagcaggtgatcgatggctggcgctattttggttatgttcccggcgagggcgaaaacgagtccgacatggcgcgccgccacaccgaagtgctgctggacgcgctgcgcggagaggggtttgcgaaacctaacccgcagcccatgttccccaatccgccgggactgctgcggcttgagccatattctgaagggctgcgcgagcgaatctggtggggcgccggttcgaatgcgacggcaagatgggcggcaacgctggggatgaacctgcaaagttcgacgctgaaagacgatgaaaccggcgagccgttccatatccagcaggcgaagcagatccgcgcctatcgcgaggcctgggcagaagcgggccatacgcgcacgccgcgggtttcggtcagccgcagcattttcgctctgatgaacgatcgcgaccggatgtatttcggttcaggccgtgacgagagcgattcgataggtttcctcgacgagaagacccgcgccatttttggccgcagctacgccgcagagccggataagctggtcgaacagctgaagcaggacgaggcgattgccgaagcggatacgctgttgctgacggtgccgaaccagctgggcgtggagtataacgcccacgtgattgagtccatactgaagcacgttgcgccggcaatgggctggcgcgacgcataaacccgcgctgagcgacgccccgcaggcgcggggcgaaagggttttacgctgcgacctttggctgtagctgatagatccaggcggtcacgcgctggccgtcttccatggtaacgtcaacggcaacgcggtcgtagccctcttcaaacgcatccagcattggccagtgggcgctaagattcgcggacaggaacagatagccgtcgacccgaggcccgttgttgtcgagcacgatccccggaaaatccgccgccgctccccagccgcgttcataaaacagaccctgtacatagccgggcagccactcgccgccaatgttgtccataatatgggcattggagtggcccggacgcagcgtgccgtagacaaataaacgttccattattcctcaatcactcaagcgttgaaggcccggacgggcagagcaggtcttaaaatacgagctctggccggggttggcaaggcgccccgcgggacgcccgctcttcatcagggctcaggtccgaacatctccagcagctgtttcttgtcgggcatgccgaccacctgctggagttcgttctgttcgttcatgtaatagatggccggcgtcgcgctggcgcccaaatcatccatcagcttttggttatgctgaagaagattaaaggtttcgcgcggcgtcacgccgtcaaagcgcggcacttttttgccgccggagagttcatactcttgccaggcggctaccggatctttggcattcaggattgccgtggcgtatcggccgcttttcggattgagaaaggcaaccagcagggtattcaactggaccttaccggcttttacccacggctgcgccgccgaccagaacgtcttgcagtaagggcagaacggatcggcgaagacgatgacttttcgggccgccgaatccgcgccctccttgagcggcccggcatcgttcagcttcttccacatttcgcggcctaatggggtatagatcgcttctttaaaatacccctcgctgaggttttgccctttatcatcataaagatacccggaaatgacgtgctttccgtccggggttaaaaacagggtcacccccatatcctgatactgaccgacccagccttttacgccgccgggggaatctatctccttgataattttgatcccttgctgttcaccaaagtttttaactatctggggaatcgccccctccgcaagcgccaggcccggtatcatccaggccgccagcaggaaaatatatttcatcatatcgcctctcaatgcagggggaacgctccccctgacgtgggttactgttttttcagcgcatcgccgattgtggcatcaaattgctcccaggggatccagcccgacagcatctcatcaccaattagcgtggccggcgttccctgaatgccgagcttttcggcgacagagaagcttttctgaatcgtctccaggctttgcgcatccggcttagccacgatgacgcccgccttttttttcgcctgctcaaggctggcgccgtcgtgataccccttttttgccatcaggatcgcattaaatttggcgaactgttcaggatgcgtgcgccacagggtgagcgcatccctggccgcggtcattgagctttcggagcgccagggcagaaacttaaagatcaccgcaacatccgggtatttttccacaatcttctccagataggggtcaaactttttacaatacggacagttatgatccgtaaagaccaccagcgtcagcttcggcttttgcgcgccgattcgcggtgagtgggggtcgtgaaagagaaaatcgccgtactgcgacagcacctggttgagcgattcctgttccgcccgggcattctgccgatcgagcttatcggccgcggcgatcaaaatttcaggatggctgagcagcgtctcctggaccagtgcctgcacgcgggcctcctgcgccggcgtgagcggcgacgaggctgacgccgtcaacgacgccgagagaagaagaaaagtgagcagcgtatttttcatcgttaattaacctctggcatgagtgagcgcgttcaggacgctttgttgatcgagcagcggcgggagcgtctctccttgcggcacgcctggaccgtagacctgattgaagggaatggcgtaacggtttcggctttgcaggaaacgggctatcggctcagagggcttgctccagtcgccgcgcagcgcgacgacatccggctcagccaacgcgctgatgatggcgggctgatttaacacccggtgttcattgactttgcacgtgacgcaccagtcggctgagatatcgataaacacccgtttgccatccgccagcgcgctctggatggccgcctcgctgagaggctgccagcgaatttgctgagcgttagcctccggcgacgagacgatagcaccctcggcgagcaggccgcgaacctgaaagccggcaaacgccgccagcgcgataatcaccagccagaaggctggcgtcgctcgcggacgggcgactaacaaggcgatcggggccgccacggtgagggccagcgtcagcatgccgcccgccgtttcgcccaggtgcaggccgagcagcgtcgtcagccagaggctggaggccagcatcatgacgccaagcgccattttcagggtgttcatccagcggccggggcgggggagcagggcggcggtttgcgggaacagggcgacgaacagccacggcgcagccatccccagcccgagcaccagaaaaatcagccacagctcctgaagcggagcggcaagcgcgaaagcgacggccgtacccaggaagggagccgagcagggcgttgccagcagggtggcaaaaacgccctcgcagaagctgcccgccatcccggcgccgccggcggtcgccagccggctcacggctgccgagggaagcagcatctcgactaccccgaagaggttcagcgaaaagagaaaggtgacggcaaccattaagccgataaaccagggattctgaaactggatcccccagcccagcgatgcgccggtgagcttcagtatcgtcaccatcagcgccagcagagcaaacgaggtcagaatacccgcgctggtggccagaaaacgcagcctgaccatgccccggtctgaaccggcctgcagcaccgcgctgagcttcatgcccatcaccggcaatacgcacggcatcaggttaaggattaagccgccgagcagcgcgaaaagcactattttcccgaaactaaccgttgccgccggggcgatatccgcgccagccgtaaggtttatctgctgcgctttttcaccatttgtcagcaccaacgacagcgcttttcctgccagcgtggcgggtatttctccccattcgtcggtgaccggtaccgtcaccttgaggtggctgccctcggcgcgaatgtccggatcgccggccacaattcccccgtccatagggtcaaaatagatcccggggtttttccattcgccggtcgcggtggcggtgatgaccagctggctcccgacccgatgcgcggcgagatcgttggttacgccggtatctgccgggacagtgcgcatggcccgggcaaaggcgtgccggaaatcgccgtccgcgggctgattgaaatcgagacgcagacggtagtcggtcagcagacagacgttgctgcaggtcgatagcgtaagcgtgccttccagcacgtcgccgggggcggcggcgatcgtcatcgggatcgcgacccggtcatggtagccctgggtcgtcaggccggaaatcttgaatcttgacggggcaggccagtaccaccgcgcctgttccccgttgttccagatgatttgcggggcgacgccgccttcgcccggcgagcgccagtaggttttccagccggaagccagctcaatagagagcagtccgtcgatccgatcgtttcctttttccgcctgaaagcggatccgggcatggtcgttttgcggggatgtcagccatccggtgtccgccccgtgggcaacgcccgcgcaggccagcaacaggaagacgacgcccctgaagatattcagcatttttttctccgtgaatttaaaaattaatcgtctaagaacgatttttcattcacggaaaacgcagtttttaaggtgtattcgcagcgtgggcggccggacgggatcgtcccggaaaaccaccggacgccctgcggtgagcagctgaagcagggcgaggaagagtatgacggcaggtaaggcgccatcaaagaatagcggctgcgcgcagagcagggatttagcgctcagctgacagggcgagggtcctggctcagcctcctcagaagacggctgctgggcctgcgcgctgaagggtatcgcctgcgtgccggcgccgacatcggccaaaaaatggtgcagataggccgcccgctgaacaaggcagaatgccatgaccaggcaggtcagtatcaaaaaccatttaccaggaagccgacgattgtgcatagggtaccaggacaagacagaacccgaggatcataaacaatccttatcaatgtacaagaggctggcgtgtaaggttttgtctggatggataacgttgccggcgtatgcggcggaaaggcgggcgttcaggtatttagtacatttatattatttacagcgttgatgcatccggctactattcgcgtcgctaagcggtaccggcacgccgctgccggacgtgactgcttagcgcctgaccgccattagctcatctggaagagcgaacgacgtacgttgtagggaacggggttcgaggcctcgatggcggcccaacacttgcttagcgaatccgcacggtatcggtaataaagcctctcgcttctgttgaatacgcctctgaacatctttaatcactccttttagatctctttcctgctattgctacatagccgttattattgcctgtgaaataatttctcttctctcgctattactcgcaacggaatgtgattgcctggttttatcgcgactgccctggcaaaggaatatctgaatttggagtgtttaagatttacctaagcaaatctgaataattttaatgtgaatctacttattaggatttagtcgcgtatttttcagaaatttcatcactttttatatggtattctcccttgttcaaggagtgaacgaaggaaaaaagaatgctttaccgctatgccgttttctccagaaaacataatacgtttcatattcttttactgtttaccattttgataataagtttcatacatttgagcgtgctgctggaaaccgataacacatggctgctggggccgatggtgatttatctgcccatttttttcctttggcgaaaggtctcagtgttacgaagcagaatcgctgattaatgtgctggtggagttccctacatgagtgaaaatacaacatctaaagcaacctctgaaccgaaagtccggcagcccgtcttgcggaaagtcgatcttaacctgttaaccatttttgataccgttatgcaggagcaaagcttaaccaaagcggcgcacacgctgggcatgtcgcagccggcggtcagcagcgcggtctctcgcctgaaggtgctgtttaaggatgaactgttcgtccgcaacggccgcgggataaaaccgacggagcgcgcctttcagctgtttagctccgttcgtcgcgcgctgtcgctggtgcaaaatgagctaccggatacgcttttcgacccgctggactgcgaacgtaattacaacctttgcgtctgtagcccgttggataactacctgactccgcttatttttaacaaaatcagcgagattgctcccagggtcactctttcctttaaatcttcgctaagtcagcaggtgacaaatcagctgcgctatcaggaggtggaatttgtactcgattacaacaaattcaatcatccggaatttaccagcatcccgctattccatgaccgaatggtgctggtggccaggcgcaaccatccgcgtatcgcatcgccgctgagcgaggaggatatttatcgcgagcagcatgctaccgtcgcgctggatcgctacgcctccttcagctatccctggtatagctctgaagagcagcaggcctgcgtcgcttttcacggtaacgcgatggtcagcgtgttgagcgtggtgtcgcaaaccaatatggtggctatcgcgccggaatggctggcgaaagagtttgaagagcagtttgcgctacagctgctgccgctgcctttagaaatggacagccgtacctgctatctttcgtggcatgaaacggcgggccaggagagaagccatcgctggatggcggagctgctaataaaaatttgccagcgctaaatagacctgaagaaatgcctggtaagacgccaggtattttattattcacgctcaactctcgccctgaacattaattaagatccccgctttattcttgttcatcaggcactgatgaccagataaaatacgctgtattaataaatttaacccgccagaatttcattaaaaaatctatttacctaaaatcgcgcatttctccggcagagccaaccggcggtttctgtacccaatggatttcgagttgctttgaggcggcaagagagagacaaattcgtcgggaacgaatttgaccagccgaaggctggccgccggtgagaggcaggagcctctcattaatccccaggaatttactcaagtaagtgactggggtgaacgaacgtagccaacaaaaaagcaacttgaaagacgacgggtatatactcttattatccagccgggccgacgcctgaaccaggggatgatgttgatgcgcagaaaaatgatgaagcctgcggtggccgtcgccaccctgatgatgtcatcgacggccctacaggcggatgaaattaacctgtattcggttaataccggctcctggatttaccatctgtcgaacaaccacggccagtacaccgaaggttttgacaaccagtttgcctccgttgagcgcagattctccaaagattcgccgtacagcctgctggccggaacgatgaaaaacagctttgacgatcgctgcattgcgctgggggttcgccgcgactgggtctcgttgggcaacggctgggtgtttaagggaatttatggctacgttggcgagttttttttctcggccttcgagcactgcggcgatcatggttcttataaggattttaaagacgccaccggcatcggcttttctccctatatttatcatggtttccaatacaactttaccgattatttcggcgttgaaagcggaattattcttcccgccgtctttgtggtgagcatacagtggagtttccgctaatacagtggcgaaaacccgcccgctgtggggctttgaaagaaccgtaataaaaaatgaagctatcttaaggttattttaatcttcaccgcggcggttatttttttatagcatttttctcgcccttatccgcccgcgctcagtacatttcacttttttcattagatggtaattgtttgcattatcattcacattcctctgtgatttaatccttgccggccggcggccagtgactcttcgcccacctctattaaggattagtttatgcgttttcgtctggtgtcttattgctccgctgcattaatggcttcttccgcgtttattgtcccgcaggcgctggcggcggccagcagcgacgggattgtggtctacaacgcgcagcatgaaaatctggtgaagtcctgggttgacggctttaccaaagagacgggaattaaagtgacgctgcgtaacggcggcgacagcgagctgggtaatcagctggtgcaggaggggacggcatccccggcggatgtctttctgaccgaaaactccccggcgatggtgctggtggataacgcgaagctgtttgcgccgctggcggctgagacccttcagcaggtcgccccgcagtaccgccctgagcacggccgctggataggcattgccgcccgcagcaccgtattcgtctataacccggcgaaaatcagcgaagcgcagctgccgacatccctgatggatctggcgcagccgcagtggaaagggcgctgggccgcttcgccatccggcgcggattttcaggccatcgtcagcgccatgctggcgctgaaaggcgagcaggaaaccctggcatggcttaaagcgatgaaaaccaattttgtggcctacaagggcaacagcacggtgatgaaagcggtgaatgccggtcagattgatggcggcgttatctatcattactaccgctttgtcgatcaggcgaaaaccggcgagaacagcaaaaatacccgtctccactactttaaaaaccaggatccgggcgcctttgtcagcatttccggcggcggcgtgctggcctccagcaaacatcaggaacaggctcaggcctttatcaagtggatcaccggcaagcagggacaggatgaactgcgcaccaataacgcctttgaatacgccgttggcgtcaacgccgcgtccaacccgaagcttacgccgctgaaagcgttagaggccccgaaggttgagccgtcttcgctgaacagcaaaaaagtggttgatttgatgacccaggctggcctgctgtaatcgtccgttaaagtgaacacgctatgtcttctctgagtttcgcgctcggaaaaaaagcccaacgcctgcccgagcgcaggcgtcctgcttttccgatgatcgcgttagccgttctgttttctctgctggcgcttttgccgccgggttttgttattgccgtaggggtcgataccggctgggagacaatccaggcgctggtctttcgcccgcgcgtcgctgagctgttgagcaataccctgtggcttatcgcgctgacggtacccctgtgcattgcgctgggcgttggcctggcctggctgacggagcgcacgctgctggcggggcggcggctctggtcggtgctggcggttgcgccgctggcgatcccggcctttgtgcaaagctacgcctgggtcagcgcggtgccggcaatgcacggcctctctgccggggtgtttctttcgctgctggcctactacccgtttatctatatgccggttgccgccgttctgcggcggctggacccgacgctggaagatgttgccgcctcattaggtacgccgccgtggcggatctttttccgcgtggttttgccccagctcaggctggcgatatgcggcggcgcgctgctggtggcgctgcatctgctggcggagtttggcctgttcgcgatggtgcgttttgatacctttaccaccgccatctatgaccagttccagtcaaccttcagcggcccggcggcgaacatgctggccggggtgctggcgctctgctgtctggctattttgctgctggaaggggcgtcgcgggggaaagcgcgctatgcccgcatcggttcgggcgccgcgcgcgaacagcagcggcagccgctgggccggctggcggcgatccctctccagctcgcgctgctgacgctggtgatgctggcgctgggcgttccgctgatggtgctctgccgctggctatggctgggcggcgtggagaactggttaaacgccgacctctggctctccctgcggcaaacgctgctgctcggcgcggtgggcgctctcctcaccaccgcctgcgctattcccattgcctggctgggcgttcgctatccgcagcgccttattcgactgctggaggggtgtaactacatgaccagctctctgcccggcatcgtgacggctctggcgctggtgacggtcaccattcactacgcgcgccccatctatcagaccgagttcacgctgctgctcgcctggctgctgatgtttatgccccgggcgctggtcaacctgcgcgccggcatcgcgcaggcccccgtggagctggaaaacgtcgcccgcagtttgggccgcagccccggccgggcgctgtggagcgtgaccatgcggctggcggcgccgggcgcggcggcagcggcggcgctggtgtttctcggcatcaccaatgagttgaccgccacgctgctgctctctccgctcggcacccgcacgctgtcgaccggcttctgggcgctaaccagcgaaattgattacgtcgccgccgcgccttacgcgatgctgatgattctgctttcgctgccgctgaccggcattctctatatccagtcgaaaaaaatcgcaggcctgtaaatgcttgaactctcctcaatctcaaaatcttttgccggtacgcgggtgctcgaaaacctgaatctgacggtggccgcaggcagccggacggcgatcgttggcccctccggctccggtaaaaccacgctgctgcggatcctcgcgggtttcgaaacgccggatagcggacgcattgttatgcaggggcgcacgctgtttgcgcaggggacatttattcccgcccacctgcgcggggtgggctacgtgccgcaggagggcgcgctgttcccccatctgaacgtcgcggacaatatcgcctggggcctcgacggcagccggcaggagaaatatcagcaggtggcggcgctgatggagagggtgtcgctggaccgtcaactggcgaaccactggccgcacgaaatctccggcggtcagcagcagcgcgtagccctggcgcgcgcgctggcgcagcggcccgcgctgatgctgctggatgagcctttttccgctctcgataccgggctgcgcgcggccacgcgcaaagccaccgccgatttactggcgcaggccggggtcgcgtcgattctggtgactcacgatcagaatgaagcgctctcctttgccagccaggtcgcggtgatgcgccagggacgttttgcccaggtcggcacgccgtatgaggtctacagccgtcccgtcgatgaagagaccgcgctatttctcggcgatgcgctggtgctgcccgccgagcttcgcggcgggcgggcgcgctgtgcgattggcgaaatttcaaccgatgatccgcatgccgtcggccagggaagggtcatgctgcgccccgagcagctggttatctctccctctccggcggatggacagtcgctcaccgtacgcgatgtggactttagcggccacctgtcaacgttaaccctggcgatgcccggccagggcgagccgctgatcgtcaaaaccgtcagccggcagttatggcggccgggggcggcggtacgcattgaggtggtgggcgaggcgcgggtctttgcccgctagcgccgacgggctataaatcaatgcacagattcgccgaccggctgcgggagcagcacagggcgatctgctgcgcgccggcggatttctccgcctccgactgcacggtgtcgcggtggtcgacaaccccctcgataaccggcgtcaggcaggcgccgcaaatccccatctcgcaggagagggggacggcgacgccgttctcctggagcacctgggcgatggtcttatgcgggggcaccggccaccgctctcccgaggacgcaagcgtcacgctaaacgtttctccctcctcagcgccggcgggcatcgcgacaggctgaaaggcttcgctatggatcagcgtttccgcccagccttgttccatggcgacccggcgcgcggcggccataaatccctctggcccgcagagataaatcggatatccggtatgcgtcttgttcagcgcggcggctaaatgctgccgggcgctgtctccttcgcaagagctgtgaatcaccacgctttcggcgcggaatcgccgctgcagttcgcggacaaacgccccctgggcgcgatttttcaggtaatagtgcagcgtaaacggcacgccctccgcctccagccttagcgccatcgcgtacagcggcgtaatgccgataccggcggccagcagcgtcacccgctccgccgcccgtaagggaaacagattgcgcgggggagaaatcaacagcgtctggccgggacgcagctgctgatggatatagcgcgaaccgccgcgtgacgctttctccagcgccacgcagatcaggtagccgtcgtctgcgtcctccgggccggtcagcgaatactggcggataatgccgcacggcagatgaaggtcaatatgcgcgccgggctgccaggcggggagcggtcgcccgtcccgcgccaccagcctgacggcgaggttctggctgccctggcgccagaggccgtcaacggtaacctctactacatcgctcatgatggctctccacttaaacgaggaaaaagtcgccgaagcccatttttttcagtccgcggcgataggcgatggagctgcgatcggcggggatatgcgcttcgagcgttaaatccagcggcagtctctccgggcgctgggtctccaccatcaggcgatcttcctcaaagacgcgcaggttaaaggcgtgaacatcctctaccggtacgtgcagatcgaaattacgcgcgatgggcgcgaacatccgggttatccgcgaggaaaccggcgaggcggcgttcatgatcaccagcctggcctcaccgggaaaatgaatcgtcagggtggcggtaaacggcagatgcatctcgaaatggcgcagccactggaagccctccggcgcgcgaaactcggagctggcgggatagttgccgaccgaactccagtaatcggcgataaaaccaaacgacgtctcctgcgggttatagttcggcaccacctggttatccgggtcggcgaaagtatcggtatggatccaggcgaaatgggcgacatccagaaagccctctacctggcgccccgcaaagccgttgacctcaaaggccgggcagttgatttgctgaaagccgtcgtcgtgccagtgcggcatcaccggcagcggcatcgggttctccgggtcgaaggccaggcaggtccagatcaggccatagcgctcctcaaccgcaaagctggtgaggttgagcttcgccggtaccggctggtcggggctggacgggatacggttacagcggccatcttcgccgaagcgcaggccgtggtacgggcagacgatcccttcttcatcgtgaaagccgagcgtcagcggcacgccgcggtgggggcagacgtcgcgagcgaccaccacctggcccttaatacgatagatcaccagctgctcatcaagcagggtggcttttaccggcgcggggccgatatcgcaggcgcgggcgaccgggtgccagcatttcgccaggcgcagccagtcctcaggctcaaaggtgcaatgggcgggtggggtgggctgtggtctgttcatggcttctcttcctgctcacaaaaacatttgtttaattgttgtgagtttattgttgtcatattagggtgttgacatccatcagcaagaattcatccagccgttgcaaaaaagagaacaggtcaccgatgagcccattttcacgtttcgccctctattttgccgaagtcgcccgcagcggtagcctgcggcgggcggcagaaaagctgcatatttccgcctcggccatcaaccggcaaatcttgcaggcggaagaggccttcggcacgccgctgttcgaacgcctgccggaagggctgcgcatgaccaccgccggagagctgctgtacgacaatctgctgcgctggcaaaaggagtttcatctgacgcggcaaaagtttgatgagctgcaggggctaaagcgcggcaccgttagccttggcatggtgcaggcgctggcggaagggagctttgccgccgcgctggcggatattatcggcagctggcagtggctcgagctgaatttgcaggtcgcggatagccataccgtcagccagaaggtgcggcaggcggatcttgatttcggcctgattctggatcctgaaggccaggccggactgagcgtactggcctttgctgaactggagatgggcgcggtgatgcgtccggatcacccccaggcgcaggctgcgatgctgtcgctaggcgagctcagcgaggagcggcatattgttcccggcgcgccgctgatcgtccacgatcgggtcgcgatgctctatcgccattatgattttttcccggcgaacagtatcagctgcaacgatatccggctgattaaatcgctggtgcttaaaggcggcggcgtgactattctcagccgtctggacgtgctggaagaggtgaagctcgggcagctggcgtttgtcccgctgcgcaacaagctgctgcgcccgctcaccctggccctgtgcaccgcgccatcgcgccagctctcccgcccggcgcagatggcgatccagaagctgaccgccgtgatggaggagatgcaggccgggacagcggcttccccccccgtctgcgtaatatgcccggcctgaaatactctgcggcctgtttccccggtggcgctgcgctgaccgggctacgggttcctctgcgtctgcgatccggtagcccggacaggcgcgcagcgccgcctccgggacggtgtcggggtgatgcatcggcgtggcttcttcccggctcgcgctgcgcttagccgggctacgagctgaccggggctacgggttccctcgcatctgcgatccggtagcccggcgaaggcgtttacgccgcgagccgggaagggggctgatgccagcatctttaccccagcgggccgccctgaatggtttcgcacagaccgttgataatccgctctccggtttcggatttcagctcctgataccaggcttccgtcagcgccatatctttaccgtgggtcacatcgcagcgcttacgcgccttcagcaccaggtcgcgcacccggtcgcagcgctgcgcttcgtactggcgcaatacctcggtgatatcgcggctctggcggaacagatcccccagcaccaccgcatcctccagcgccgcgcagccgccctggccgatatccggcgtggtgctgtgcccggcatcgcccagcagcgccaccttgccgcgaaccagccgttcaaacggctcgatatcatggatttcaatgcggttagtggtctgcgggtcgagggcggcaatcagcttctgcacctgcggcgaccagccgctgaagtagcggctgagatccgcgcgcagggtgctgcgatcctcggccagccccgccgggagcggaacatcaaagaaaaagtaaaaccgtccatcggagaccggcatcagcgacacccgtttcccctcgccaacgaaggtggtccactggttgcccggcgcaatcgcctcatcaatttccaccagaccgttccagttaacgtagcccgcgtagcggcgctcaggggtatagccgagcacgtacgggcgcagcgccgaatggctaccgtcggcggcaatcagaaaatcgccttcagccatcgacccgtcggtaaaccagacgcgaaccccgtcggcattttcttcgcagcgggtgacgcgtttaccaaactgcacggcgtcgcgcccccagaagtcgagcatctcgcgctgcagctcggcgcgggaaaccggacagggacggccgccggtgcgcgccaccagcggcgcgaggctgaactgcgtcagagtctccccgcgcagataatccttgtaagccagaaaatacatggggccgccgtaactctcgataatatcccccatgcctaaatgcttcatgcacttaacgccgttaggccagatggagatggccgcgcccaccggcttgatttctttcaccgcttcaaagacttcgcagtggataccggcattttttaatgccaccgccgcgctcaggccgccgattccgccgccgataactaatgctttcatttgcttctcctttacatacgtcgttattggcttgagcaatttgcgtaccactttggcgcaggcgctgatttcgccgattcgggctccccgcgaccgtgcggttgcacaacgctggtgcgcagagcgggttttattgcctttttatgaatcaataatttctaaatttgcaatggagaatctaatgtttcattgtcgcgccgaggtcagacgccagggggctggcaaaactgatggtttatctgcttgaaaaaacggaataaaattaaatgttgcgcaaatgtgagcgagtttggcctgttttgtgcacccgttcccgcacgcttattcgcaacgggatgaaacgaccatgtcagatgaaaaaaacggcggcttactgtacggccttgagcagcggatcccgccgctcccggctttttttagcgccttacagcacgtactcgccgggctggtaggcattattacgccgccgctgattatcggcgcggcgctggggctgggggagtggctgccctatttgatcagcatgtccctgctggcttccggcatcgggaccttcctgcaatccaaccgcctgtgggggatcggcgcgggcatgatctgtatgcaggggaccagctttgcgttcctcggcgtcgccattgccggcggtatgtgggtaaaagggcagggcggcacgccgcaggatattatggccatgctgtttggcgtcaacgttgtcgccgcgctggtgccttgtctcgtcagccgctttattgaaccgctgaagcgcatttttactccggtgattaccggcagcgtgattgcgctgatcggcattagcctgattaaagtcagcgtcattaactggtgcggcggcgagcaggctaaagcgtttgccagcatgagcaatatcgccctcggcgcgggcacgctggggaccatcgtcctgctgagctgtgcgaaaaaccgctggctgcgtctctcttcggtggtggtggggattgccgtcggctgcgcggcggcggcgctgagcggatcgttccagcttaaaggcgtcggcgatgtctggttccgcttaccgcagctgttcccgtttggttttcagtttaacagcgcgatttttctgccgattgcgctggtgtcgctggtctgcattcttgaggcggtgggggatctgacggccaattgcctgatctctcagcagtcgatagatgacgaggcctttcgttcgcggctgaaaggcggcattcttgccgatggcataagctgcatggtggcggcgatgctgtgcgcgttccccaataccacctttgcgcaaaacaacggcgtgattcagatgaccggcgtcgccagccgctacgttggccgctacatcggggtgattttgattctgctgggcctgtttccgccgttcggcgagatactgcgccagatcccggcgccggtgctgggcggcgcgacgatggtgatgtttggctgcgttgtggcggcggggatccgcattatcacccagaaaccgctgacccgccgcgatatgctgatcgttggcctggccttcggttttggtctcggcattgaagcggttccggcgtttctgacccacttcccgccgatcgtgggtaacctgttcggttccgcggcgaccagcggcgggctggtggcgattgtcctgaatctgattattccggaagagaaaccggccgcggcggcggccacaaggagcaccgatgatcgcgctgaatcactttaatcagctgagcggcgaacatgccgtcgccgtgctggaaccctgcgtggccgtctccggctgggcggcggcgctggccgccggccggccctggcgcagccgcgctgatttactcagcgccgcccggcggctgatggcggcgtggggcgaagcggagctgaccgaggcgctaagcgcccatccgcgtatcggcgaaaagcccgccgggtctcaggcgcacgcggcgctctcgcgtcaggaacagggaagcgttgatgaccgcgatgctgcgctggcgcaggcgctgaaagagggcaacgcccgctacgaagcgcggtttggccgggtctttttgattcgcgcgaaagggcgcagcggggatgaaatcctggcggcgctgtcgcgtcgcctgcaaaacagcgagcgcgcagaagtcgaagacgcgttagcgcagctgcgcgaaatcaccctattaagactggaaggagcgattggcgaatgagtaccttaagcacccatattctggatatttccaccggccgaccggcgcagggcgtaaagattgcgctggagcgcgaaggcgcgctggttgcccgcggcgtcaccgatgataacggccgcattggcgaactcggcgccgggacgctggcaccggggcgttaccggttgtgcgcggaaatcggcgagtggtttgccgccagcgggcgcgagacgctctacctgagcgcgcagattgatttcgtcatccgcgaagcggctggcgagcactatcatttaccgtttttaatttcccccggcggctggtctacctatcgcggcagctaaatttccccggaggcggcgctgcgcgcctgtccgggctatgagttcggcgctgtctgtggtctggtagcccggacaggcacagcgtgccgcctccgggaaagggactactgcgcagccgcatccccccacacgcgctcgccgtttacccacgtctcgctgatattacgttcatcgcccagggtcatcagcacgaacagctgttcatagatatctttgcagcgcccgctgcgtaacttttgcagcggcgtgaccgccgggtcgataaccacgaaatcggcctctttgccgggctggaaattgccaatcttctcgtcaaggcgcagcgcgcgcgcgccgccaagggtcgcatggtagaaggcttcgctggcgcgcaggcgatagctttgcagctggctgaccttatacgcctcgccgagggtgcgcagcatactgaacgtggtgcccgcgccaacatcgctaccgatgcccatgcgcactttgttctgccagcaggtcggtaaacgaaacagcccgctgccgagaaacaggtttgacgtcgggcagaaggccagcgctgagccggtctcgtgcaggcactgccattcggcgtccgcaaggtgaatgccgtgggcaaacacgctacgctcgccggtcagccgatagtgatggtagacgtcaagatagtgctcatgctccggccacaggctttttacccacgccacttcgttgaggttttcgctcaaatgggtatgcagccaggtatcgggaaactcttcccgcagctgccgcaccgcggccagcagctccggcgttgaggtcggcgcgaagcgcggcgtaatggcatagccgaggcggccgcgccggtgccagcgttcaatcagttcgcgagtttgccggtagctctgctccgcgctttcgctcaggtagtccggcgcgtggcgatccatcatcactttgccggcgagcaggcgcatattcaggcgcagcgcttcgttaaacagggcatccaccgattgcggatgcagcgtacaaaaaaccagcgcggtggtggtgccgtggctcagcagctggttgacaaaaaactgcgcgatctccgcggcgtagtcggcatcggcaaactggctctccacgggaaaggtataagtggtgagccactccagcagctgctcgccaaatgcgccgatcatctcggtttgcggatagtggacgtgggcatcgacaaaccccggcagcaatagcttaccgtgcaggtcgcgatagcccttctgcgggtgcagaaagcgttcgccctcctgccacggcagcagcgcctgaatgcgtccgtcgcgaagaaacagcacgccatcctcgagatagcgcgcctggcggtcgatatcgtcggcgctctcggcaaccccggcgatatcgaaaaatgcgccgcgaactgcggcatggtagtccatcatcatagctgccctgtgggttagcgaaaggataggttgattgagcaagattaatgccagtttgcgcaggcggagagccgccgcgacgtgacgccgcggcgggaaggccgggttactctttctgggcgagggcgctgaagccggcggtggcgccgacgcgctcgtcgcgggcgatccagcggtaggccgcgccgctcaggaagacgccgataaaccagctaaagttagccacttcgtgcagggccggaataaagctgatgaccagaccaatcgcgacggagggcaccagggcggcgatcgctttcgggttaaagccgttgcggtaccagtactggccttttggcgtgtcgtcgaacagatcgttaacggaaaccttgccgcgcttaatgatgtaaaagtccacgatcaggataccgaacagcgggccgataaacgcccccagcacgtcgagggtgtagtggatcagctccggcgagttaaacaggttccacggcgtcagcaaaatcgatcccacggcggcaatcatcccgccggtgcggaagctgattttctgcggcgagcagttagagaaatcgaacgccggggagacaaagttggccacgatattaatcccgatggtggcggtgatcatggtcagcaggccaatggcgaccgccaggtcgttgcccacgcggctcacggtctcaatcgggtcggtgatcatgcggccaaacagcgactgcgtgccggagacaatcaccacggtcacgatggagaacagcaggaagttaaacggcaggccccagcggttgccgcggcggatctcacccatgcttttgccgtagcgcgagaaatcgccaaagttgagcagcgggccggagaagtaggagaccaccagcgcggtggcggtgatcatctgccaggtctgctccccggcgctcagcgatttgctggcgagggtaaaggagatcccgtcaaaaccggtcttgtatacaatccatcccgccagcgccagcattaccacgtagaccgccgggccggcgatatcgataaagcgcttgatggcgttcatcccgtgccagaacaccatcgcctgcagcagccacatggtggcgaagcagagccagcccagatgcgacaggccaaggaagctggaagcggtgagcgtcgacagcgagggccagaacttcagcagcaccagcatcagcgcgttggcggcgagataggtctgaatgccgtaccacgcgaaggcgataagcccgcggatcaccgccggaatattggccccaaagacgccaaacgcctgacgacaaatgaccgcgtagggcacccccgccatctggctgggcttcgccaccaggttggcgcacagctgaacgatgcaaatccccaccagcaggcacagcagcacctgccagctcgcaagaccaagggtaaagaagctcgccgccaccacgtagcctcccatgctgtgcacgtccgacatccagaaagaaaagatgttgtaccagctccagttctggtcgcgcgtcggcgccagatcctcattgcaaagccgtgggctgtatccagcgtggggatcagcggccttaacctgatgcgtattttgttgatttggcatgaaacctgctcctgtaaatgaacacccgtttaaatggattgccgaggctgttgcaggaatcaggccaaaacagttaattttgtatgcaagaattaaattttatgtatacgattcgatatcaaaaagtgaaagtcggagtggttaatgagcaaccaacatcgtctgcaggccgcgccagagctgcaggataaagacgaatccatctatcaggcgctgatgaccgcgatcgtcgagcatcagctgccgccggggagcaaactgccggaggaggcgctggcggaggtgtttggcgtaagccgcaccgggatcagaaaagtgctgcaacgactcgcgactgtgcaaatggtcgccctgacgcccaaacgtggtgcacaggtcgccagcccaacggtcgaagaggcgcaggcgatctttcgtacccgcgcgctgctggaggtggccaacctgccggatgtgctgacccgctgccagccgccgcacctggcggcgctggaggccattatccgtcaggagcagcaggcgcatgaacgctatgacggcccggcggcgatccgctattcggccgagtttcatattcagctgcaggcgatctccggcaatcaggtgctcaccgagatggtgacccgcctgagccagcgttcatccttggttatcgcggcgtggggatcgccgtggcgtcagggctgccgctgcgacgatcacgaacagcttgtccagctgctgcgcgacaaggcgctccagcccctgagcgacgccttaagccaccattttgaacatattgtcgccagcctctgttttgagcgctctggcgtgactctgcccgattttgcccggctgtttgccggctataaggagccgtaatggccgctgtttgtatacaagtcatcaaccccaacaccagcctggctatgacggaaaccatcggtgccgccgcgcgggcggctgccgcgccgggaaccgagattctggcggtctgcccacgcgagggcgtgccgtcgatagagggccactttgatgaagccatcgccgccgtgggcgtgctggagcagatcaaagccggtcgtcaacagggggtagacgggcacgtgatcgcctgttttggcgaccccgggctgctggcggcgcgcgagctggcgcaggggccggtggtggggattgccgaagcggcgatgcatatggcgacgctggtggccacccgtttttccatcgtgaccacgctgccgcgcaccctgatcatcgcccgtcatctgctgcaccagtatggttttcatgaccactgcgccgccctgcacgccattgatttaccggtgctggcgctggaggacggcagcggtctggcgcaggagaaagtacgagcgcgctgtatccaggcgctaaaagaggacggctgcggggctatcgtgctgggctgcggcgggatggcgacgctggcccaggagctgacccgcgaactgcgcgtgccggtgatcgatggcgtcagcgcggcggtcaaaatggttgagtcgctggtggcgttaggcctgtcgaccagcaagcagggcgatttagggtttccggaagccaaggcgttgagcggcaaatttcaggcattaaatcccttttaatatgaagaggtagcagatggcatttttggcagacgattacccgcgcgatctgcgcggctacggcggacagccgccgcacgcgcggtggccgaacaatgcgcgcatcgccgtgcagtttgttctgaactacgaagagggctcggaaaaccacgtgctgcacggcgatgccggttctgagcagtttctgtccgatattatcggcgccgccagctatcctgaccggcatatgtcgatggattcgctgtatgagtacggcagccgcgccggtttctggcgcatccataatgagttcagccagcggggactgccgctgaccgtgtttggcgtcgccatggcgctggcgcgtcatcccgaggtggtcgaggcgattaagtcggcgaactatgacgtggccagccacggctggcgctggatccactaccagaatatgcctatcgagcaggagcgggagcatcttcataaagccgtgcaggtgttaaccgatctgtttggcaaaccgcccaccggctggtataccgggcgcgatagtccccatacccgccagttggtggtggagcacggcggttttgattacgacagcgactattatggcgacgatctgccgttctggagcgaggtggcctgcggcgacgggacgcgtaagccgcacctgatcgtaccttataccctcgacgccaacgatatgcgctttgccaccgcccaggggttcaataccgccgagcagttttacacctatttgaaagacagcttcgatgtgctgtacgccgagggggccagcgcgccgaagatgatgtccatcgggatgcactgccgcctgctggggcgcccgggccgcttccgcgcgctgcagcgtttccttgattatgtgcagcagcacgaccaggtttgggtctgcactcgtcagcagattgccgaccactggcgcgacgttcatccgttccgggggtaaaggcgttccccgggtcgcgccgcaagcggcttacccgggctacagctctgcaaacggccgcaatccggtagcccggacagatgcgcagcatcgcctccgggaaatgacgccatcctgcgctatgtccccgggggcggcgccgggcgcccgcccgggctacgggttcatcaccctctgcggatccgtagcccgggtaagcgcagcgcaacccgggggataccgggaaaggcgcgaggcttaactcatcaaactcacctgggcggcgacgatgcgccagccgcaggggaagcgcacccaggtttgctgctgtcggccaatgcgttcgctgccctggcgggtgaattcggtgctgcacaccgcgtaatcctcgccgaaggtggtgatggtggtgtgccgcagcgcgcgctgcaggccggcggccgggcgggcggcgcgaaaggcgcggatttcgtcgataccgtagagattttccccggcccccagccgcaccgtgcgcttatcgtgccagaacagctcatccagcaccgcgatatcgttgctcaccagcgcttcctcatagcggtaaaacgccgccgtcacctcggcgagaaccaacgggcgattaatctgctcttgcgtcatcatgctgctatctccaccgggcgggcgtcggtaatgcccatttcctccagcgcccgcgccgcgcgcagacaggcttgttcattaaaaggcgcggcaatcagctgcaggccaatcggctgaccgttcgccgtacgcagcggcacggtgaccaccggcaggccaaggaaggagatgggctgggtcagcatccccatgctggcgcgaatcggcagcggctggccgttaatctccatggtctgcgcgccgatgagcgtcgcgctgcacggcgtggccggggcgatcagcacatccgcatgggcgaacagggctttaaacgcctgctgcgcgtggcggcggaagcgctgggcctgaagataccaggccgacgggatcatcgcgcccgccagcaggcgctcgcgggagttcggctcaaaacgttcgggctggctacgcagcgcgggcaggtactgatttccgccctcggcggcgctgataataaacgccgccgagcgggccagctccgcctccgggaaaatcacagcctcatgcgccgccagcgccccggcgacgcgagcgacggccgcacgggcgtcgttatcgcaccatgtcgtaaaataaccgccgagggtggcgcagcgcaggccttcgagcccgcgcgacagcagattcgccgtgcgctcgctggccttgtcggcctgaaaaccatcgcccggatcgcgaccctgcagcgcatcgtaaaccgcggaaaggtcgctgacgcagcgggcaaacggaccgatatggtcgaggctggcgacgaaaggatggctgccggagcgcgataaccggccaaaggtcggcttgaggccgaagatcccgcacagcgaggccgggacgcgaatggagccgttggtatcgctgcccagcgagaaattcaccagcccggcggccaccgccgccgccgacccgcccgaggagccgcctgcgatccgcgaaagatcgtgcgggttacgcgtcgccccgtagtggctgttctcggtggtaaaaccgtaggcgtaggcatccatattcagcatcccggagagcagcgcgcccgcgctatgtagctggcgcaccgcccagctgtcggcggcggcggcggggcgatcgctcagcagctgcgccccggcaagggtggtatggccggcgacatcgaacagatttttcaccgcgtagggaacgcctgccagcgcgggcaggggctttttttcccgccgcagggtatcgatattctctgcctcagcgagcatgcgcttttcgctgacgtgggtccaggcgttgatctgcgggttaacgcgggcgatgttctccagggtgtggcgggcgatctctttggcgctgagctcgccggcggccagcgcgcgctggatttcgtgaatcgtcatttcaggtagcttcatgctttatagactccggcgatttcgacgcgatcgtcgaggggaaaggccagcagcggcccggccatggcggcgatgcggctaaactgcaccctgagctctgcgcgccgcgcatcgtccagctccagcgccagcagctgttccatttgtgtgaggtaagcgtcccattcgttgtgcggtgtgttcatcatcagctcctaatagccggcggcggagccgttgctgcgcggatcgctggccccctcaaacaggccgttgggatggcgtacaatcgccccggcgtggcccatggcttcgctaaaatcggccagcacgtcaacgtcgtgccccagctgacgcaggcgggcaacgctttcggcgctgaagcggccctccagcttgagcgagtcggaagtctgcccccaggtgcgccccagcagccagcgcggccgggtgatgctctcctgtagcggcacgttttgcatgacgtagcgggtgaaaatagcggcctgagtttgcggctggccgtcgccgcccatggatccgtacaccatcacccggccatcgttcagccttgcggcggcggggttgagggtgtgaaacggctgcttgccgggcgccagcgccagcaggtggcgcgggtcgaggctgaacgatgccccgcggttctgccagacaatgccgctttccggcagcaccacgccgctgccgaactcgtggtacaggctttggataaaggaaaccgccagcccgcttttatcgataacccccatccacacggtgtcgcccgggcctttgcccgcgccccacggggccgcccgctggtcgtcgatattctccgccagcggctgcagcgccgccggcgtcagcaggctctggatatcgacatcaaggtggcggggatcggtgatatgcgcgtcgcgcaggccgaaggccagcttggtcgcctccacaattcggtggacggtcatcgcatcgtcggcatcggccatcgccagcctgtcggtgatgccgaggatcgccagcgaaaccagcccctgggtcggcggcgcgaggttccacagttcgccgtgccggtgcgccagcctgagcggctgggggcggcgagcgcgatgctgctgcaggtcgctaagggtgacgggcagcccgtacttttccataccgcgggccagctgctccgccagcggcccgcgatagaagctgtctaaaccgtcttcggttaatcggcgcagggtgttcgccagcgccggctgcaaaaagcggctcccggccttcggcggctggccgtccaccagaaaggtttcggcgaagccgggctggtcgcgcagttcgctgaatttatcggcggtcgcgctggcctgcgaggcggtcaccgggataccgccggcggcgtagccgatggcatcttccagcagacgcgtcagcggcagcgatttcccggttaactcccgcgaaaccttaagcgcttcgtcccagccgctgacggtgcccgccacggtcagggccgcctgcggtccgcggtgggggatctgcgcgaggccggcgtaggcctgcggcgtcgccagcgaccccgccgcgccgctggcgtcaatggcgatgggatcgccctcggtgggcacgataagccagaagccatcgccgccgaggccgttcatatgcgggtaaaccacggcgatggtcgcagcggcggcgaccatcgcttctatggcgcttccgccttcgcgcagaatcgccagcgcgctctggctggccagatgatggggcgcaaccgccatcccgcgggcggcaacatgactttgcatggggtgtcctcaattaagcgaaatgtccgcagagggttgcaaaagctgttccatgtctgaacgtaaagtttcaatcgttgccgacgatgcgcgttttttgccgaactggcatgcattatgaaaggcgttagcggtatagtgcggtgaaacgaaagttacagaggtcttatgcaacagcttgatgaacgactgaaagagcagtacccgtcattatcaccccaggagcagcgggtggcggattttattttcgatcattttgatgacctgattagctacaacagcgccgagctggcgcagctgagcggcgtatcgaaagccacggtcagccggctgttcaagcgcctgggctatgaaaaatataaagatatgcgcgatgagctgcgcaccctgcgccagagcggaatgccgctgaccgataatcgcgatgcggtacagggcaatactctgctggcgcgccactataaacaagagatggccaacctgacacaatgggttaacgcgctggatgttcagcagttcgccgaggcgattcaggcgctggtcgccgcccggcgtattgtgattgtcggcatgcgtaatgcttatcctgcggcgctgcatctgcgtcagcagctactgcaggcgcgcgggcaggtactggtgctgccgcagcccggacaaagcctgagcgaggaactggtggatctcagcgccgacgatctggtggtggtgatggcgttccgccgccgcccgcgaattattcgcccgctgctgctgcagctgcagagcagcggcattccggcgctgctgatgtgcgagccgcaggcccacggcctgtttccgctggcgcgctggcggctctgcgcaccgctggatagcgtatcggcctacgacagctacgcctcggtcaatagcctgatcaatctgctgtcgaacgcctttctgcacgaaattctcgataaaggccgcccgcgcattcacgacatcgccaccctttatcagcagctggacgagctggaacaacgataatggggcgccagcgtggtgctttgcatggttttggtgcgataaaataatgggggaacgcgcggtcgttccctcttaattcctcaatttcccttgttttacgttcgcttagccaagcggcgggctaacccgatgcgcggcgctttatctggcacattagttgcaaaagtgacttcaaagaatcttttgtttcatgctaacgtaacgggtaaacatcatgaagaaactgttgatcgcactggccggggccgcttgtctgttaaccaacctcccggcggcgaaagctgaccagctccaggatattgaaaagcgcggcacgatccgcattgcggtgccgcaggatttcccgccgtttggctcggtgggtaccgaccttcagccgcagggctacgacatcgatatggcgcgctatctcgccaaagagatgaagctcaagctgcagctggtgccggtgaccagcgccaaccgcgtgccttatctgcaaaccgataaggtggacctggtgatttccagcctcggtaaaaacgccgagcgcgaaaaggtgatcgactttagccgcgcctatgcgccgttcttcctcggcgtatttggcccgaaaggcgcggagctgaaagacccggcggcgctgagcggtaaaagcgtgggcgtgacccgcggcgcggtggaagatatggtgctgaccagcgtggcgccgaaagaggcgcagattaagcgctacgaagataacaacaccatgctgtcggcctatttatctggccaggtgcagtatgtggccaccggcaacctggtggtggcggccatctcccggcagaacgctgacaaggccccggtgccgagctttatgctgaaggattcgccgtgctttatcggcctgaaaaagaatcaaccggccctgaaggcgaaagtggatgcgctgattgagcagggcgtaaaagacggcaccctgaacggtttgtctgagaagtggctgaaagcgccgctgcctgccagcctcggcgcgtaaggtccgggcatgacggagcaacttcatttttctgcgctctggccgcactggccggagctgctggcggggctgtgggtgaccattcagctgacggtgctggcgacgataggtggcctgacgattggcatcttcggcgccgccatccgcagcgggcgtcccacgtggttcagccggatttggggcgggtatgtcgaactgattcgcaacacgccgtttgtggtacagctgttttttatcgtcttcggcttaccgaacctggggctgaagatgacggcgggcgaggccgcgctgctggcgatggtggtcaatcttggggcctacagtaccgagatcgtacgcgccgggattcaggtgacgccgaaaggtcagtgggaagcggggcgcgtactggggctgacccggacgcagacctttattcaggtcattctgccgcccgcgctgcagcgcatttatccggcgctggtgagccagtgcatcatcgtcatgctcggttcgtcggtggtgtcgcaggtctcttatgaagagctgacctttgccgctaacctgattcagtcgcgcaccttcctcagttttgaggtctatctggtgacgacggggatttatttagcgctgtcgataacgatgcgtcagctgctgatggcggcgggacgtaaatggctgggggtgcaggcatgatgaccacctttaccgattgggacattgtccgcaatctgctgctggccgggcgctggacggtgctgctgtcgctggtggcgtttctcggcggcgcgctggtcacgctgccgctcctgctgctgcgcatgaccggcgggcgtcaggtaaaacgcctgatccgcggctatgtcgaactgtttcaggggacgccgctgctgatgcagctgtttctcgcctttttcggcgtggcgctgttcggcatcgacgtttcggcgtggaccgcggcgtcgctggcgctgacgctgtataccagcgcctttttgctcgatatctggtttggcagcatccgcgccctgccaaaagggcagtgggaagcctcgcgctgtctggggctgagctttggccagacgctgtatcgggtcgtcgccccgcaggcgctgcggatcgccatcgccccgacggtggggtttgccgtgcaggtgatcaagggtaccgcgctggcgtcgattatcggcttcgtcgagctgaccaaagcgggaacaatgctgaccaacgtgacgtatcagccgtttaaagtctttgcgctggtggcgctgggctatttcattctgtgttacccgctgtcccgctacagccgtcatctggagaacaaattcaatgcctctcatcaccattaatcagatgcagaagtactacggcgataaccacgtgctcaagggcgtcgatctggatatcgatatgggcgaagtgatctcgattatcggccgcagcgggtcgggcaaaagcacgctgctgcgctgtatcaacggcctggaaggctatcaggaaggcagcattaagctcggcgggatgaccattaccgaccgcgactcgcaggcgcgggagatcagccgctctatcggcatggtgttccagagttttaacctgtttccgcatatgacggcgctggaaaacgtgatgctggcgccgcgtcgggtgctgaagaagagcgccgccgagtgccgtgaactggcccagcggatgctggaaaaggtcggattgggcgaccggctcgattactacccgtcgagtctctccggcggccagcagcagcgcgtggcgattgcccgcgcgctggcgatgtcgccaaaagttttactctgtgacgagatcacctcggcgctggatccggagctggttggcgaagtgcttaaggtgctggagcagctggcggcggagggcatgacgctgattctcgtgacccatgaaatgaattttgcccgcgaagtgggcgaccgcgtcgtgtttatgcatcagggacgcgtctgggagcagggcgacagcaaaacgctgttcgccaacccgcagaccagcgaactgaagcagtttatttcctccgtgcgcggcctcaatcaataaggacttaaagatggatatcactcagtttccgcaactcaacccgccgtcgcgcctgctgatggggcccggcccgattaacgccgacccgcgcgtgctgcgcgccatgtcgagccagctgatcggccagtacgacccggcgatgacccactatatgaacgaagtgatggcgctgtaccgcggcgtatttcgtaccgaaaaccgctggacgatgctggtggacggaacctcaagggccgggattgaggcgatcctggtttcggctattcggccgggggacaaggtgctggtgccggtgtttggccgcttcggccatctgctgtgcgaaatcgcccgccgctgccgggcggaagtgcacaccattgaagtaccctggggtgaggtgtttaccccggaccaggtggaggatgccatcaaacgtattcgtccgcgcctgctgctgacggtgcagggcgacacctccaccacgatgctgcagccgctggcggagctgggggatatctgccgccgctatgacgtactgttttacaccgacgccaccgcttcgctgggcggcaacccgctggaaaccgacgcctgggggctggatgcggtctcggccgggatgcagaagtgcctcggcggcccgtccggcacctcgccgattaccctcagcgcgcgcatggaagaggcgattcgccgccgcaaatgcgtggaagaggggattcgcaccgatgcccaccgcgacggcgacgaggagatgatctactccaactatttcgatctcggcatggtgatggactactgggggccggagcgccttaaccatcataccgaggccaccaccgcgctgttcggcgcccgcgaatgcgcacggctgatcctccaggaggggctggataacggcattgcccgccataagctgcacggcgacgcgctggtcaaaggcattcaggcgatggggctggagaccttcggcgacctgaaacataagatgaacaacgtgcttggcgtcgttatcccgcagggtatcaacggcgaccaggcgcgcaagctgatgctggaagatttcggtattgaaatcggtacctcgttcggcccgctgcacggcaaagtgtggcggatcggcaccatgggctacaacgcgcgtaaagactgcgtgatgaccacgctcagcgcgctggagtcggtgctgaactatctcaaattccccaccactcagggcgcggcgatgcaggccgcgtgggatcactatcgcagcgagagcgcccaatgagtccagcacaacgccagcaggcggaaatgcagcaggccgcggcgcgggtgatggcccgcgccgatgagctggccgcgatcagcgaaacgccggatgccctgacccgggtttatctctccccacagcatctcgaggccaaccagcgggcggcgcggtggatgacccaggccggaatgaccgtctggcaggacagcgtcggcaatatttgcggccgctacgagggagagcaggagggagcgcccgccatcctgctcgggtcgcaccttgatacggtgcgcaacgccgggcgctacgacgggatgctcggcgtactcacggcgatcgaagtggtgcacggtctgcatcaacaggggcggcggctgaaacaggccatcgagattgtcggcttttgcgatgaagaggggacgcgctttggtattacgctgctcggcagccgcgggataaccggtacctggcccgagagctggctggcgcagaccgatgccgacggcgtcagcgtggcgcaggcgatggtgctggcggggctggatccggcgcgcattcatcttgccgcccgccgcccggaggagattgccgcctacctggaactgcatatcgagcaggggccgtgcctcgagcaggaagggctggcgctgggggtggtcgaggcgatcaacggcgcgcgtcgcctgaactgccgctttaccggcgaggcgggacacgccgggaccgtgccgatgagtcatcgcaaagatgcgctggtcgccgccgccgagtggatggtgcgggtagagaccctgacccgcgagcagggcggaaaccgggtcgccacggtgggtacgctgcgctgcgcgcccggcgcggttaacgtgatacccggcgacgttacgctgaccctggatattcgcgggccgcacgaccagccgctggatgcgctactggatacgctgctgaatgaggcgcaggccattgcttctcgtcgccagctgcggttcagcgccgaagagttttaccgtattgccgccaccgcctgcgatagcggattgcagcaggtactgagcgaggcggtgcaggcggtgcaggggcgttcgttgacgctgccgagcggcgccgggcatgatgccatcgccatggccgaacgctggccgtcagcgatgctatttgtgcgctgcaaaggcggcatcagtcatcatcccgccgagtcggtcaccgccgacgatgtggcgctggcgatagcggcctattcgcgcgcggtgtcggcgttggatgccgggaagtagcggctatcgtttcgcttctggtaaaccgggcatagcgcaacccccaccacggtgggggctgttttatcttttgccgttcggtttaagctgttcgccgggtctgagcctgaacagctcgtcatctcgggtggagtagcgaaccgtcccgtcagccagccgataagcaccctcggtgaatcccgcgccgttcaggaacggcgccaccgcgtccggcgtgttgcggaaggcggcttccagggcgagaagcgcatagggggcaatactatcgatactggcatattcggcctcaggatcatcgacaaaaaagccgttgaggcgctgcttgttgatgatgtttgcgccgatgcgatccgccagcgtcaaatagtcctgctgcccggtggcctgccacaggtcgataagcgcgaaaatcgcatacggctgatggttctccgtttggctattcagcctgcggtttgcgccgccgggttcaccgatatcgcctaaaccctggcctttcgcgatgccgcgggcgactttccagatggcacgatccggttcaagcgtccaggcgcgggcgtaggagagaagaaattcatttcccgccggataggctttgagcaccgtgccttttttcccataatagccatcgcgttttaacacgtagccggagagatccgtaccgttggccagcatcgggcggaaggtattgttctgctcatcgtaagcgtaggtcgcgaaggccttgaggccatcaagggtccattttttgagatcgtcaccgtctttgccgagcgattttgccagggcaagctgcatcagcgcattttctgagtagagcgtgctggtccggcccttcagcagcatattgccctccagcgcgtccgggcccagttcggggccaaactgacgctgcgcgcggtcgccgtatttcgaatgcgtgtcgctgtcatcggtggtgtcagcgcgttttagcggttgggtaaactggtagacgcccagtccggtcttcttatctcgcggcagaacgtactgttcggccagaagcttcgcccacgtcagcgcgccagcgtcaccatcgtattgatagagcagcgatgcggagtagataaggtcgttgccggcattgagaaagctcaggcccttggtggcgaaaaagggcggctgttggacaaaatcactttgccagagcgcgcccatcgctttgccgtactccccgtgacggctggtttccagcgttttccagtcgtaaacatgagcgttccagaaagccttgataaagcgcgcggtggccttgtcatcgacggcaaacatcatgtcgtaatagggatacgcgttcttaagttcatggaccatctccttttcgctcgggccttgaggctgcagcgttttcaaatcaacaaagcgatggcctccccacagcagtagcccgctggcgtcctgatagtggtcaaagtagtagcgaatattctccgcgacccgctgcttatattttgcttcgccggtcaggttgcttaaccctaccagcacccgcatcaagttttgctgggccgagaagttcgacagcacggtcactttaccgtccggaaagacccattccatttgcttgccggtgcgaggatccacgccattggccagcagaggagagtgatggccgtaccgatctcccgctttatccagcacgacgtcagcgaactgctttacgctgctcaggcgcgcgttctcctgggcgccagcactcagtgagaagagactcagagcgcccaatgccagggtgatttttgcaatcttcattattatcctcttaatgaaaataagggtttaataaaacccttatttattatctggctgacaggaagttatcagaaggagtatttcacaccaacgcgataacgcgtttggcgttcatcggtggttttactgccggaaacgttgccgatggccatataaggagaccagtttttatcaaatttataggttagcttaaaatcatgggtccagtcatagctttcgttatccgctaaaataacccccgcggagttggcttttttatagtccagttcataatcgagctgataatctttgaggaatttccaggaaagaacgctggtcagattatagccgttctccgaggtgtctttagacgtgccgatattgcctgaattgcgcttgtagtaaggtcggtagcgcaatgaggcgctgacatcgtcggtcagattcgctttaccgcgcaggtagggacgatagttgtttgaggacgaactggtatccagagagaagccgggctcaatctggaaggttttatttattttatgcacatagctcgccaccacttcggtgccgttactgacggtttcatcataggctttatttttatcctgcgaacctttccatttcccttccagcgacaggccaaagccattggcaaaacggtgagacatcagcagtctgtctttatgattattgccggctttgtcattggtttcatgacgataatcaaatgtcaccgcgtgggcagcaatactgataaaagggatcgtgactaataataaggaacgaaacatagggtgcctctactttttttattttccaaaggtacaagaaattacctgccgtaaagcaggcagaacgatacaaatgaaattattagatggtagtgtggtgccgggtgcctcccggtgaatcaggcgctgacttcctgattcgtctataaaaacgaaacgtcgatgagggcattcctcaattcagcatgaccccgccgcttagggggattcaccacacattattctttattccctggtgatgactaattagtactgtctgtaattttattgaaaattacttttacacaaaatgaaatggtgttttgagatcgagatctgaatattaaaaatagagggtaaatattttttatgtcatttataaagataatcctaataattaattattcttttaaatcagcttgttgagtggtttctttgggtttattttgcgtttttatttgcgaatataaggattttttgtgaattgacggtaatcttattcctatatttttaagcgctcagtttgttaaaagttaaaaatagttcgatggtttcaatggttaaaccgaagccagtactgccaatccctttaagctaaacgaaagctaaacggaaaagagggcggtattgatctgccagactgacgacataacactctcagaaaagcatccatatggaaggataataaaagacggtaacctcgggacttcaagatgactattcatggaaaggatcgtgtatttatttctggcgttgagaatatagtgcaggagctgagcgatggcgcggatgccgggttaagcaactgcgtgtatgtcacctgcgggatggatatccaggagatatatgctttgttctttcgccatccgccggagcactacgccatcttcatcacctctgagcgccattttgagaccatcaaccggctgtttccgggcctgttaaagctctgtttgtcagagaggttgacggtcgaagagctgcgtcaggcgttaaaagtgatgggcctgttatcggcccagaaccagagcgttgcttatctgcccgatacgtttaattttacccatgccgagcaacagatcatgaggctcagtttacgcggccattctctggatgatattgcccgtatccgcggggtcagcccgtccacggtcagcgtccagcgtacccggctgatgaagcgcatgggaaccaaaagcctgcaggagctctgctccctctatgcggctatgcgtaccagcgctttctgaataaacgcagggctggaatctggcgaaatttgagatattattctgagccattgtactagtttaaaggttcaaagtgatgacgttttccacccttgccgatgtcagaagccagatcgattcgattgatagcgaactggttagcctgattgctcaacgtgctgagtgcgttaaagccgctgccgcattcaaaactgaccactccgccgttcgtgctcccgcgcgcgtgcagcaggttattgatcgggttcgcgaaaaggcggctgccgcagggttacccgaagtgattattgagaaagtgtatcggtccatgatagacgcctttattgagtatgagcttgagcaacataatcagctacagcggcaaaaaagtaacggtgtgttgggtgagtgacccacacgatattctcctggcgcgcagggtcagttagcctcattctgactccccgacgggctgctaagctattatccccacgctctgatagccagtgccgcgctatagagcccgaatccccaggccagatgtgtgagcacgcttagcaagcgagccagccacgggtgaggtgtttgcgatgccgcaatgccgaagcccaatgcgggctgaagtacgctgcacgcagccggagcataggcattgtgaagagtttaaaaggattgtggcgagagagctgaggctggtcagctaattaagaaccttatactttgacgagagcataatgatggaaaaaaattttacgcctgagcaaatcgaaatcattaatcgcgtggtttttgcgcgtatcgagcatatgaaagagaaagtgattgaaaccattgagcagacagagcgcgatgcgcaccagcagctggtggattgcgggattgatatgaccgatttctgtccggctaatcagcactttctcatgatgacaatcgtccaggcgctgatagatcgggtgcacgggagcgacagggcgcttgcccggaagataataaccatggaggcgaagagactgaacgtcagcgttaacgtcgaggcagatagttcgagataaccttaaggctgagtctgcggcggaccaggaaatccgcgcccgtcgcccggcatcgcacctttacagttcgcgcaaacgctctgcgctgttatgctaaaaacccggcaagccgcgctgtaatgagacctgaccatgcccgaacgcgaaaaaaacatccatattcaaccctgttcttctatctctcgaacgcatattcttccggcactgctggcgattgtcgccgtatcgagcctgtgcgcgttcgtctcgccgccgctggggccgtggcgcgaaattttgaccaatccagggatgtatatcgatctgctggcgctgctatttctgctgtttatgctctggagttcgaccaaggtgcggatgaaccacgtggcggttaactgggtacgctacggcctgctgctgtggattgccgggggcactttcgatctgatggacgaaatattccaccagccgcgctggatggggtactactgcgaagatctgctgcgcctgtccggcatgctgctgagcgcggtcggggtctacaaaattattgagcgcatcaatctcctgtacgtcgacgcgcgttcgcaatcgctcaaggatgagctgacccagctgcccaaccgtcgcttttttatcgacaccatccgcgagaaggaggggcgcaggctggcgctgatgattgtggatatcgactacttcaagaaaattaatgacacctggggacatctggtgggggacgaagtgctgtttgcccttggcaaacagctggcgaagcttaccagcgataaggtgttgccttcgaggattggcggagaagagtttgccattattgtcgatggcctgtcggcgcaggaagtggatgaactggcgcagtcgattttgcaaaacgcccgcgcgatcctgatcaaccacgataacccgctgtcgatcagcattggcgtcggtctgcgccataaagacgagccgcagaacctgtttattaaaaaggtcgatgacgcgctctataaggcgaaaaataacggccgcggacgggttgaatgggccgcgtgaactatccctgctgcgcgctgcggcagtggcgacgatattcggaaggcgagcgctcggtgtagcgtttaaacacccggcagaaatagttgctgtcgacaaaaccgcagttgtgggcgatctctttgaccttaagatcgtagccgcgcagcagctttttcgccttttccaggcggacgctggtgagaaactcattaaaaccgacggagccggatttctggaatatatgcgacaggtagttgggcgtaatatgaaaacgcttcgctaccgactcgcgggtcagcggctgggtgagatgctcttcgagataatcctgtaccgccagaaacagatcgcggctgcggctgacgcgcatctccagcccgaccagctgctcaaggcagtggctcaacagggccgcgaccaccagcctggcggttaccgggtccggctgcaggcagatttcattgagcgacagcagcaggtaggagcccacgcgcggtccgaggcgggcgacgttctgcttttccgtgcgcagctgcttgccgtcccagtgctgaacgcaaaacccgagcttctggcgaccaaacagaatgcttaacgtcgacgccggcgcggtccattccggcagcgtccatttacccgcctgaacgtagagcacctgcgaggcggagagcatcgtctccgacagcggcagcccgctctccttaagctcaccctcaagcacaatttccagccgtggaaagggcaccttaaacgccagcgcgggctcggagatatccgggtcggggaacctgacgtgcagattatctttctgatttactaaacgatttaaaatatccgccagatcgtcaatcattccgtatgccttagaagagagcaattatcctgttgattataatctattttatctgcacaggtttgttctgtatcaggcgacttcgctaatgcctgccctgcaggaagggggaaaaagctggattttgatggccatcacacttttccctgccgcgtacgctcgtccagtttttcgtagttttgccctcatgtattcccgcccgccgccgattagagtttgttttgtgttatcgataagttaaggaatataaatatggaacaacaatctgcggtttatctggatgcgctgggggcgaacgttgcgctgagcccggcaatgaaacaggagctggataccctgggctacaccgttgtgcataacgtggcggacgcggagtggctggcggcgatgcgcgcgcttatcgacgccatcgtcgagagagagggcgataatctggcgatcgagcaccaccaggaagcgacggcaacccgcatcgccaacctgattaacaaaggcgcgatttgggaaaaggtctggtcccatccgctgattctctccgcctgtcggcatgtttttcagggggattttaaagtctccagcctgaacgcgcgggaagcgttgttcaacggcggccatcagccgctgcatgcggactggaaaaagccgcgtcacgattttccgaaagtgcatctggtgaataccatctgggctatcgatgatctgagcgctgacaacggcgcgccgcgcattattcccggcacccatttgcgtccggagctgccggaagaggtgctggatgacccggagctggcgcatcctgatgaggtggtgttcgccgcgccggcgggcagcgtgatgatttataacgcccacgcctggcacggcgggacgcgcaaccgcgtcggcagcagaaggcgcgtgctgcacggtttatatatcgacagggcggataccgcgcagcaggatcagcagcgctggctgacgccggaaaccgccagccgcctgacgcccgcgcagaaatggctgctgggggtggcgtaaaaatcgcatggaatggtagccccggtaagcgcagcgcgaccgggggaagtctgagcgggcgcggtgttatttccccgggccgcggcgcaagcgccttgcccgggctacaaaacggcaaacggcggtgaacctgtagccccggtaagcgcagcgcgaccgggggaagtctgagcgggcgcggtgctatttccccgggccgcgggcaagcgccttgcccgggcggcaaaatcaccggtgtactcacgggatctcaagataaaccaccggctttttcataatgcatttcaccgcgtcgacaatctgctgcggctgcagcagaaaggttttgatgctggtcttaatggtgcggatgccgctaaagcgtccggcatcgtcaatttcaatatccgtcaccagcagaacgacatcggcatgggcgatgtcgtcggccattattttgttctccacccccagcgcgccctgggtttcaattttgatattccatttctcctggtggccgactttttccagccgctcggccgccatataggtgtgagcgacgccgctgacgcaggccgtgacggcaacgatagtgaaatccatagcatcctcctggcgttatccgccgacggtcacgctaaaaccggcccgttcggccagcgtcctgaatggctgaatctcagattctgcaggggctttaatcatcgacatcgaccatttttttcccagtaagtgatatttggcttcgccgtactgatggaacggcagaagatgaatttccggcagcttaaagggggccaaaaatgccagaatccggcggaaattcgcttcatcaagcgtgaatcccggaatcagcggcacccgggggatcacgtgaatatgcgcttctaccagacgggtaaagttatccagcacccgcggcatattcatccgcagctgctcgcgggccagcgtttcatccatgatttttagatcgaatagcacttcatcgcaggcctgcgccagcggaaaaaagcggcggtaggcggtatcgcccgccgtttcaatcgccgttctgatcccccattcgcgcaggcggcgcagcaggcgcgcggcgaattcggcctgcatcaggacttcgccgcccgacagggtcacgccgccgccggaggcgcggaagaagacctcatccttcagcacctctttaagcagattatcgagggtgacgtcgcggccaatctgctgccacgcgccggaagggcactcgaccacgtcctgctggcagcgggagcagcgcaggcacttgctctcccggcgtacggtctgaatttgcggcgagatcgactccggattggcgcaccagggacaggtatgcgggcagcctttaaaaaacacgacggtgcggatcccctgaccgtcattcaaagagtagcgctggatattaaaaatgcgcgccttatcggcgcgcgtttccaggacctcacagctgatgcgcggtgcggcggataatgtcatcctgaatctcctgcgacagctcgacgaaaaaggcgctgtagcccgcaacgcgcaccaccagacctgcaaaatcctgcggccgctgctgggcttcgcgcagcgtatcggcgttgaccacgttgaactgaatatgctgcagcttcagcctggtgaatgcctgcaggaagtcggccagcttattgaggccgccgtcgccggcaagggtcgccggggtgaatttgacgttcagcagcgtaccgttggagagcagaaagttatccagcttgctgaccgacttaagcaccgcggtcggcccctgcacgtcctggccgagcatcggcgacagcccgccgtccgccagctgctctccggccaggcgtccgtccggagtggcgccgacgaccgagccgagcggcacgtgggcagagacggtataggagcccggcgtaaagcgaccgccgcgcgggttgcggtactgctctacctctttgcagtagaagcgcagcagatcggcgctgatgttgtccacttcgtcaatatcgttgccgtatttctcgaagcggttgatcaggcgcgcgcggattttttccccttccggcgtctggaagttggctttcagcaccgcgatcagttcagcgaagctgagtcgtttttgctcaaacaccatccctttaagcgcgtgcagcgagtcgctgaggttagcgatgccgatgccctggaccccggagaagttatagcgcgcgccgccttcggtgatatcctggccgtgctgcacgcaatcctcaataaaggaagagagcaggggaaccggcgcccagtcgcggtggccgatatcgcaaatattgctgccttcgaccatcagcttaatgtaatagcgaatcttgtcgcggatctggtcgatcagcccatcccaggtgatgtcagggttgctttcgttttccagcatcacgatttccatcaccttcagcagattgaacatggcgatatcgtgcaggccgtaggtgcgccccgggatcgacagctcaacgcagccaaccaccgagtaatcccgcgcgtcatccagcgagacgccgcggttaagaaacgccgggatcaccacttcatcattgaagatttgcggaatgccggtgccgaggcgaatggtctcggcggttttgcgcagaaaagggcgatcgaccagctcgttgacccgcacgccgaggttcggctgcggcaggcgaacgttctggtaggcgtcgagggataaaaacgacaggatattgaccgcgctgcgtccggtctcggtcaggccgccgagcagggcggtatagccggtcgggaagcccgcgaagtagcgcgcgctgctggtggagcgcagcaggacaatatcgttgcacttcacccacagcgactccagcagctcctgaagaaactgcggatcctggccgcgattcagcgaaacctgatagtacggcagcatgtactggtcaaagcggcccagcgaaatggagctggcgttggattcatactgcaaaatgatgttcatataccagaagagctggcaggcctgccagaaatcttccgggcggtgcaccgcgttatggcgggagatgtccgcgatggtctccagctctttgcgccgctgcccgtcgctgcagccggcggccatgtcatcggcaagcgccgcatagcgcagaatatggcgctgggaggcttccagcaggatcagcaccgcctgataaaaattgttctgcgggtgccgctgactcaccgctttcatctccgccaccagcgcggcgaggccgttttccagcagacgagggtagtcgatgatgatatgtccctggcctttatcggtctggttgatgctaaaaatctgcgtgctaacggcggccttcacttcatcggtcatctgggcgttgatgaagtccttcatcgagcgattttcccagtaggggaacagcacttcgcggtagatgcgtttatcttcttcgctgatgttgaagcggtcctgcgggcgggtcgggaactggtccagctccttgagcagccagtagggatccatctccggcgacatgatcccggcgcgcggcttgatcgtacggttgccggcaatcagttcatcatcacgaatcgaaatctgcacatgatcgaggacccatgcggtcgctttcgcccggcggatcatcaccggctccccctcggtctgtttatggctggcggtgtagagcagcgctcgctcgagggagatttcgcgcgggttggcgaacagacgatcttttaagcgttgagtgcgattagtcatgacaagctccatgttattttgcggggcgcaggccgcgccccgtgcattcagtcaggcattctgcgaaaggtggctgtcgattttgttcataatggcttcggcgcgcttcacggcgtcgctgatgttgacgcgcacgatggttttaccggcaaaacgctcttcaaacttgatgccgatatctttggtcagaatcaccatatcggcgctggcgacgtcttctgcggtcagctcgttctcaatgccgatggagccctgggtctcgactttgacctgccagcctttggccttagcggcgctctccagcgattcggcggccatataggtgtgggcgacgccagacgggcaagcggtaacggcgataattttggtcatacaatattccttcccgtgtctcagttaatttcgaaatcaagatccatctcgtcatcggctttggcgtcagacgttttctttttcgccagggccttaagcaggatgacgcaggcggcgctgacgatggcgccaaccgcgaggccggcaataaatccgcctttaccctcaacgaccggcagaacgataagcccgccccagccggcatagcactgggcgccgagcagcgcggcggtaacgcagccggcggcggcgccgatcatattggccgggataacgcgcagcgggtcggcggcggcgaaggggatcgcgccttcggtcacgccaacgcagcccatcaccagcgcggccttaccggtttcgcgctcttccgcggagaagtatttacgtccaatcagcgttgccaggcccatgcccagcggcggcacggcgataccgacggcggcgatggccaccacgctgtaaacgccctgggaaacgcaaatcagcatgaaggcgtaggcgaccttattcaccggaccgcccatgtcgaaggccagcatcaggcccatgatgatggcgagaatcacgatgctgccttcgcgcatgccctgcagccagccggtcaggctggcggtgagcgcgccaatcggctcgccgaggccccacatcatgatcccggcggtaataaaggtgccgataatcgggataacgaagatgggcatcaccgagcgcagcaccttgtgcaccgggattttcttcaggtagtagaccaccagcccgccaataatcccggcaattagcgcgccgaagaaaccggcgccgaagctgttgccgacccaggcgccgatggcgcagggagccagcgccgcgcggtcggagatggagtagccgatataggccgccagaaacggcaccataagcgtcaggccggccacgccgatatcaaacagttttttcaggttagggtcggtggcggcatcgggcaccgcgcccttgccgtacaacatgacggagactgccagcaagatccctccggacacgacaaacgggatcatatgtgaaaccccggtcatgaggtgctggcgggtattttttaatatttgcaccagttcattcattgttattctcctgagcgctgcgtggcccgtgactgagttgatgcttcaaccttagaaaaagggcggcgcataaaatagtagagaaaaagtgcatttactggatatttgtaaggccagaggaaaattgcgatccacctcaaatcttagcgctggtgggtttttggcgccgttagtcaggcgatttgtgaccgcgagcataaaaaagagtcgggcatacaattatccagtaattgccacttttatcgtgtagtggcgggccggttctttctttaccttttggctaaatacgcattattcaggaggaaggcgatggctctggtaattgaattcatatgtgatttgcccaacggcgtgcatgcgcgtccggcaagcctggtagaaaccctgtgcaatactttttcgtcttcggtcgaatggttaaatacccgcacggaaggacgcggaaacgcgaaaagcgcgctggcgattatcggcaccaataccttgaagggggaccgctgccagctggtcgtcagcggtgaagatgaacagcaggcgtttgatgcgctgtcggcatttatcagcgaggagttcccgcactgcgatgcgccgctgccgacggcggaatccatggacgttcagccggttcctgaatccctctcgcgcctcaatcccacgctgtttcacgcccagccggtctgcgccggcagcgcgggcggcaggctcacccatcttaaatccctcgacctgcgcgattcaggcgcgctgcccgcagcgggcgcaattgaacaggaacaggcggcgctggacaggggcctgaccctgctggtgaaaaatattgagttccgcctgctggataacgacgggaccgccagcgcgatccttgaggcgcatcgctctctggccaccgacgcctcgctgcgccagcatctgctgggcgggctgttgagcggcctgagctgcgctgaggcggtggtcgcgaccggcgaacacttttgcgcccagttcagcgcttccggcaatagttatttgcaggagcgggtgctggacgtgcgcgatgtctgcttccagcttctgcagcatatctacggtgaggatcgttttccggcaccgggtaagctgacggaagaggctatctgcctcgccgatgaactcacccccagtcagtttcttgaactggataaaaccctgcttaaaggtctgctgctgcgcagcggcggcaccacgtcacatacggtgatcctcgcgcgttcgttcaatattcccaccctggtgggcgtcgatatggaggcgctgctgccgtgggtcgatcggcgagtgcagattgacggtaacgccgggctggtggtggtgaatcccgatgaagcggtggcgcgctactatcagcaggaggcctgggtgcaggcgcagatccgccgccagcagcaggcctggctggataaagcggggcgtacggaagacggtattcgcctggaggtggcggccaacatcgcccattcggtagaggcgacggcggccttcaacaacggcgcgcagtcggtaggcttgttccgcaccgaaatgctctatatggacaggcccagcgcgccgtcggaaaacgagctgtataacctattttgccaggcgctggagccggccaacgggcgcagcattatcatccgcaccatggatatcggcggcgacaagccggtggcctacctcaacattccggcggagaacaacccgttcctcggctaccgggcggtgcgtatttatgaggagtatcaggcactgttccgcactcagctgcgggcgattctgcgcgcttccgcgcacggcgcgctgaaaatcatgatcccgatgatctcctcgatggaggagattctgtgggtgaaagagcagctggcggatgccaaacagtcgctgcgcggcgaacagattccgtttgatgaaaagatcccgctgggcatcatgctcgaggtgccgtcggtgatgtttatcatcgaccagtgctgcgaagagattgatttctttagtatcggcagcaacgacctgacccagtatctgctggcggtggatcgcgataacgccagggtgacgcgccactacaacagcctcaatccggcttttttgcgcgcgctggattacgcggttcaggcggtgcatcgccagggtaaatggatcggcctgtgcggcgagctgggggccaaaggttccgtgctgccgctgctggtggggctggggctggatgagctgagcatgagcgcgccatcgatcccggcgaccaaggcgcgtctggcgcagcttgacagccgcgcctgccgtcagctgctgaatcaggcgatgcagtgccgtacttcgctggaggtcgagcacctgctggcccagttccgtatgacccagcaggacgcgccgctgattacccctcagtgcattacgctgaacagcgactggcgcagtaaagaggaggtgattaagggcatgaccgacaatctgctgctggccgggcgctgccgctatccgcgtaagctggaagcggatctgtgggcccgtgaagcggtgttctccaccgggttagggtttagcttcgccattccgcacagtaaatcggagcatattgagcagtcgaccatcagcgtcgcccgtctggcgcagccggtggcgtggggcgacgacgaggcgcagtttgtgattatgctgacgctcaataagcattcggcgggggatcagcatatgcgtattttctcgcggctggcgcggcgcattatgcatgcggagttccggcaatcgctggtgacggcgcagagcagcgaggcgattgcggcgctgctgcagcgcgagctggagctgtaattcggtccggagaatctccccggtggcgctgcgcttaccggggctacgggtttccagccgtctgcggggcagtagcccggataaggcgtttacgccgcgacccgggatttccgggcccggagcctgagggaggcagattgggtagcccggacaggcgcgtaagcgccgcctccgggaaagcgtgcaggggttccgttcaccgctatcccgcagaaaatgtctcaccgtggtaggtgaacgggtaaagggggagaaaaccgtctccccctttacaatccccgcggtcccgcaaagaaatcggtgctgcgcactgcgctcacctcccggtcctcagcccgcggtcggctcaactcgatattactcgtcccatccctgggactcgcccctacggggccagcgcaagcgctgttcaaaattgctccaggcaattttgtcgtgtctcgattcgcctctggccgccatccctggcggccagcccttgtcttccgacctccggttcgccgatttcagcgggcaccagggcatcgctgcatatcacgttgtttcagaggcatatcgtagctgcacgaacatcgtcccggaggcggcgctgccgcgcccgtctgggcgatctactgcccggcaatcgcccgacaaatcgcttcgcccacctgctgggtggaggcgctgccttgcatatccggcgtcttcggtccgctggcgatggtctgctcaatcgccgccagaatgccgtcgtgggcggcctggtagcgtgcgtccccgttgccgaggaagtcgagcatcatcgcgccggcccagatggtggcaatcgggttggcgatatttttgccgtaaatatccggcgccgaaccgtgtaccgcttcaaacagcgacggaaaggtgcgatccggattgaggtttgccgacggggcaatgccgatggtgccggtacaggccgggccgagatcggagaggatatcgccgaacagattggagccgaccaccacgtcaaaacgttccggctgcagcacgaagcgggcgcacagaatatcaatgtgctgcttatcccatttcacctccgggtagtgctgcgccatcgcttcgacgcgctggtcccagaagggcatgctgatggccagaccgttggatttggtcgccgaggtcagggttttgcgcgggcggctctgcgctaattcaaaggcgtagcgcaggatccggtcaacgccgcgacgggtaaataccgactcctgaatcaccacttcatgttcggtccccggattcacatggccgccgagggcggaatattccccttcggtgttttcacgcaccacgtagaaatcgatatcgccgggctgtttacccgccagcgggcaggggacgccggggaacaggcgcaccggacgcaggttgacgtactggtcgaactcgcggcggaacttcagcagcgagccccacagtgaaatgtggtccggcacgatatccggccagccgaccgcgccgaagtagatcgcatcaaacgtttgcagctgcgcgcgccagtcgtcgggcatcatggcgccgtgctgcgcgtaatagtcgcagctggcccactcaaagtgctcgaagcttaacgccagcccccagcgttcggcggcggcctgcagcacgcggacgccttccggcagcacttctttaccgatgccatcgccggggatggcggcaatacgtaaggttttattcatcgttattctcagtttgaggtaaggaaaattgacttcaccgctatcctataattgactgattcataattaatcccgttaactggtgaaacataaaacacgaatcatgaataatttgccgctgctgaacgatttacgcgtctttatgctggttgcccgccgcgccggttttgccgccgccgcggaagagctcggcgtctcgccggctttcgtcagcaagcgcgtgtcgctgctggagcaaacgctcaacgtccagctgctgcaccgtaccacccggcgcgtggctatcaccgaagagggcgagcgcatctacgaatggggactacgcattttgcaggatgtcgaccagatgatggatgagctctccgatgtgcggcaggtgccgcaggggacgctgcggattatcagcagctttggctttggccggcgggtagtcgcgccggcgctctccgagctggcccgtcgctacccgcagctggagatccgttttgacgtcgccgaccggctggtggatttggccaatgaaggggtcgatctggatattcgcgtcggcgacgatatcgcgcccaatctgatagcccgccagcttgccagcaatcaccgcatcctctgcgcctcgccggcgtttgtcgcccgctatccccggccgaaacagctcagcgatctcgccgcgctgccctgtctggtgatcaaagagcgcgaccggccctttggcgtctggcagctgcgcgatgataaagagggggagcacgccatcaaggtgaccggaccgctgtcgtctaaccacggtgaaatcgtccatcagtggtgcctggaggggcaggggattgcgctgcgctcgtggtgggacgtcagggaaaatatcgccagcggcaatctggtgcagctgctgccggagtactatcagcccgccaatatctgggcggtatacgtgtcgcggctggcgacctcggccaaaattcgtaccaccgtggagtttttgcgccactacttccagcagcgatttccgccgcgcaacggcgagaaaaaatagccgacggccggcgccgtcggccgaggggattacacgccgagccgatcgcgcaggctgtagtaagccgcgcccatggcggtaaacggaatacgcaggctgcgcccgccggggaacggatagtgcggcagcctggcgaaggcgtcgaaacgttcggcgtccccgcgcagcagctccgaaatcagccgtccggcgaggtgggtacaggtgaccccgtggccgctgtagccctgcatataatagatattgttatcgaggcggccaaactgcggcattcgcgagagggtcagcaggaagttgccggtccagcggtagtcgattttcaccccctgcagctgcgggaaggttttcagcagcttcggcataatcagccgctcaacgtcgtccggatcccgcgcgccgtacaccacgccgccgccgtacagcagacggttgtcggcggtcaggcggtagtaatccagcagatagttacaatcttctacgcagtagtttttcgggatcagcgagcgcgccagatcctcagacagcggcgcggtggtgaccacctgggtgccgcacggcatgctgcgtttcgccagctccggctcgagcttatcgccgagataggcgttaccggcgacgatcacgtagcgggcggtgacctgtccgcgtgcggtggtcactaccgccgggctgctgtgctgaatgccggtgaccggtgattgttcgtaaacccggccgccgttgagccgaatggcgtccgcttcgccaatcgccagattgagcggatggatatgaccgccgctgtggtccagcagcgcgccggcgtagcggtcgctgtccacttcgcgacgaatggcgctggcatccagcagctccagctgggtattgccgtagcgctcccagttcgctttctgctcttccagggtctccagctgtttatgattcagcgcgacaaacagcccgccggggcgatagtcgcaggcaatctgatagcgctggatacgttcgcgaataatgtcgccgccttcaaacatcatgctgccgagcattttcgcggcatccgggccgtaggttttttcgataacgtcgatatcgcggctataggagttgactagctggccgccgttgcgtccgctggcgccgaagccgatgcgcgcgccttccagcagcaccacatcgtagcccatttcggccagatgcagcgccgaagagaggccggtatagccgccgccgacgacgcagacgtcgcagccgatcgattcgtccagcgtcgggaacggctcatagcggttggcgctggcggcgtaatagctggtggtatgttcgctcatgattaagactccagggcaatccagatagttttcagttcagtgaatttttccagcgcgtgcagggacttatcgcgtccgttgccgctctgcttatagccgccgaagggcacggtcatatcgccatcgttgtagttgttcacaaagacggagccggctttcagacggcggctgacgcggtgagcgcgggagagatcgcgggtccagaccgccgcgccgaggccgtagcggctgtcgttggccagcgccagcgcctgctcttcggttttaaagcgggtcaccaccagcaccgggccgaagatctcctcctggctgagggcggaggcggggtcgacgtcgacgaagatggtcgggccgaccgccgcgggccacggatttttacgtccatccagcagcagcgtgctgtgcgcttcgccggcgcgaataaagctgtggacgctatcggcgtggctgttgtcgatcagcatgcccatggtggtattcgggtcgagcggattgccaggctgccagccctttgcctgctcttttagcaggtcgagaaagcggtcggcgatgctctcctcaagcagcagacgggtaccggcgatacagacctggccctgattgtagaaaataccgccggcggtggcgttaaccgctttttgcaggtccgggcagtcggcaaagacgatattggcgcttttaccgcccgcctccagccagacgcgcttcatattactgtcgcccgcgtctttcagcagctgtttaccggtgcgggtggagccggtaaaggtgatgacttcaacgtcatgatgctgcgccagcgcctgaccggcctcatggccgaaaccgctcaccacgttgaatacgccgtccggcagcccggcctgtttcgccaggcccgccaggcgcagagcggtaagcggggatttttccgacggcttaagcaccacgctgttgccggacgccagcgccgggccaagcttccagcaggccagcagcagcggaaaattccacggcacaaccgccgcaatcacgccaatcggttcgcggacgatcatggccagctcgttgccgccggtgggggcgacttcgccgtacactttatcgatggcttcggcgtaccagcggatcgcgcgggcggcgccggggacatcgtcgcgcaggctgtggcgaatcggtttaccggtgtcgagggtttccagcagcgccagctcttcgcggtgggcttccatcaggtcggcgaatttatgcagcaccgctttgcgctgggcaggggaggcctgcgaccagtcgccgcgatcgaagacgccgcgggcggcctggaccgcgcgatcgacgtcggcctttttgccgcgcgcgacctcggcgagcgtctgctgggcggtagggtcgacggtggcgaacacgctattatcggcggcggcgctgtattcgccgttaataaatagccgcgtttcaatcgcgatattgtttgctttttcttgccagtaagccaggttgtgaaaatccatcatgactccttaatgacataatcggaaaaataaaaaagtggtgatttcagatcctcagggcgcagggcgtccccggggttgagtaccgtttaaattgcccattaacaggcgtgaattatccggggccagcggaataagtctttccgcattgcgcaaggtgaactgcgttatcttcgcgccgccggagttcgcctccggcggcgcaggcctgaagaaagcctgagaaaacctcaggcgaaaaaatcagaatgtggtgggggtatgggcgctgataattcggcagatacccgccgaggtgttgctgaagctatgcggtatgccggtgttaatggcatagctttgcccagccaccagatgatacgcctgaccgttgatggtcagcacgacttcaccttccagtatggtgcctatctcctcaccctgatgcttgatcctctccccggttgtggttccaggctggtacgtttcaaaaatcatcgccagcgtgcggttcggattgccattatgaaccagcttcatcgacaccccctgactgccgatttcaatcagatcgtcctgattgataaccacctgcggttcagccggtttttctggttcagaaaagaattccgagagcgacagcccgtagactttcagcagcttttgcagcgtactgattgcaggactgactttgtcctgctctatggtgctgatggcactatgtgttaacccagacagttcggcggcacgacgctgtgagagacccagctgttggcggatctctgacagacgtttccctggcgccagtccgtcatcgctcatatttgcatttccttaacggtagtggtcagagtcgctgtttttcagcaatatagctctgacaggcggtgataaaaccttcaaacaacattcgcgacagggcgtattcgctactgttccattcaggatgccactgcacgccgagggcgaaagggtggtcgttaacgctgaccgcttccaccagcccgtccggagaacgcgcctccacgcgcagccgtggacccgtcgtttttgctccctgcccgtgtaacgagtttacccaaaacgtgttgcagcccggtattaactgagaaagtaatcctccttgctgaacctgaacttcatgcgagggcgcatattgctgctcgacgggaagttcggggtcttcgcggtgttcaagaagctcaggctgctcgaacagacgacgatacagagtcccgccggtggcgacaaccagttcctgtagtccacggcagatggcgaaaatggggatgcgcctttcgagcgcggcgtcgatcagcgccatgctcagaagatcacgcccgggatcggcgtcaggctcatcgccgttttcaccatagaggtgcggctgtacgttgctcgggctgccgggcagataaatgccgtccagtttcggcagtagcgcagaaagcagttccggctcggccagcgcgtgcggcagggcaatcggcacgccgccggcgtgaacaatcgcgttcaggtacttctcttgcagagtctgggtctggtgacccttaagcctgtttcgacacatcaccacgccaataactggcttgtacattatattttccatgatcgccctcacaaagtggactaaattatgaccggattagcgggtaaaacggccatttcgttcaatattttctcaatctagcagcggatatagccctttgcaaacttaatttaacatttgacaaacaatttgtttgcatacacattcgaagggtggacattatatttaacagtgccattcagggtccgaaactaaaacaacggcggtgaatcatggaaaccaatatcgtagaagttgagaattttgttcagcagtcggaagagagacgggtcagcgcattcacctgggaagtgaagcgctacctcgagcgttaccccaatacgcaatacgttgatgtgctgctaaccgacctgaacggctgcttccgcggtaagcggatcccggtgtccagcctgagcaagctggagaaggggtgctatttcccggcttcggtgtttgcgatggatattctcggcaacgtggtggaagaggcggggctcggccaggagatgggcgaaccggaccgcacctgcgtgccggtgctgggaaccttaaccccgtcggcggcggacccggaatacattggtcaggttctgctgaccatggttgatgaagatggcgctccctttgacgttgagccgcggaacgtgctgaaccggctctggcagcagctgcgccagcgcgggctgttccccgtggtagcggtagagctggagttctatttacttgaccgcaagcgcgacgcggaaggttacctgcagccgccgtgcgcgccgggaaccggcgatcgcaatacccaaagccaggtttactccgtcgacaacctcaaccactttgccgacgtgcttaacgaaatcgatgagatcgcccagctccagctgatccccgccgacggcgcggtggcggaagcctctcccggccagtttgaaatcaacctccaccataccgataacgtgctcgacgcctgcgatgatgcgctggcgttaaaacgtctcgtgcgtttgatggcggagaagcataagatgcacgccacttttatggcgaaaccctatgaagagcacgccggtagcgggatgcatatccatatcagcatgcagaacaacaaaggcgagaacgtgctggcggacgcggacggcgaagattccgcgatgttaaaacgcgcgctcgccgggatgattgacctgatgccggcgtcgatggcgctgctggcgccgaacgtgaactcgtatcgtcgtttccagccgggaatgtacgtgccgacccaggcgtcgtgggggcacaacaaccggacggtggcgctgcgcattccgtgcggcgatcggcacaatcaccgcgtcgagtatcgcgtggccggggcggacgccaacccgtatctggtgatggcggcgatttttgccggcatcctccacggtctggataatccgctgccgttacaggaagaggtggagggcaacggcctcgagcaggaggggctgccgttcccgattcgccagagcgatgcgctgtgggagtttatgcaaaacgatcatctgcgcgagcggcttggcgaacgcttctgccacgtttatcacgcctgtaaaaatgacgaattactgcagtttgagcgtctgatcacagaaactgaaatcgagtggatgttgaaaaacgcctgattttcgccccgcgaggggcgctttagcattatcacgagtagcatcatgcggcctgagcggagcctggtcggacgtttttgctgggagcccagccattcccggatgtcgcgttaaggagcgcaggcggcaacggggcttcagttaacgacacagtgtgtaacgaggtaggaaatgatgcagatgtttaaatatccgcagggagaagggggccgtcatggccgcatggaatgcgtcgccaccgccgctcgtcggttctttttaccttttgatttgccattaaccccgttgcgaagcaggttggtttcccggtctctacgaccgcaaacccaggtgtgcagcgggggaaatggctatgtctattaatccctctctcgataacgcctccggggcggaaaaaccgcgcctgcgcaagtctctcaagctgtggcaggtggtgatgatgggcctcgcctatctgacgccgatgacggttttcgatactttcggcatcgtctccggcatcagcaacggccacgtcccggcgtcctatctgctggcgctggccggggtgctgtttaccgccatcagctacggcaagctggtgcgccagtttccgcaggcgggttcggcctatacctatgcgcagaagtcgatcagcccgcacgtcggttttatggtgggctggtcatcgctgctggattatctattcctgccgatgatcaacgtgctgctggcgaagatttatctttccgcgctgtttccggacgtgccgccctgggtgtgggtggtgacgtttgtggctattctcaccgcggcgaacctgaaaagcgtcaacctggtggcgaacttcaacaccctgttcgtgctggtgcagatctcgattatggtggtctttatcgtgctggtggtgcaggggttgcataaaggggaaggggtgggcaccgtctggtcgctccagccgtttattagccagaatgcgcacctgatcccgatcattaccggggcgacgatagtctgcttttcgttcctcggtttcgatgcggtgaccactctttccgaagagacgccggacgccgcgcgggtgatcccgaaggccatcttccttactgcggtctacggtggggtgatttttatcgccgcctcgttttttatgcagctctttttccccgatattagccgttttaaagacccggacgcggcgctaccggagatcgccctctacgttggcggcaagctgttccagtcgattttcctgtgcacgacgtttgtgaataccctggcctcaggcctggcttcgcacgccagcgtgtcacggctgctgtacgtcatgggccgcgataacgttttcccggagcgcattttcggctacgtccatccgaaatggcgtaccccggcgctgaacgtgatcatggtggggattgtcgcgctgtcggcgctgttctttgacctggtcaccgccacggcgctgattaactttggcgcgctggtggcgtttaccttcgttaacctgtcggtatttaaccacttctggcggcgtaaaggttttaacaaaacctggaaagatcgctttcactatctgcttttgccgatggtgggcgcgctaacggtgggcgtactgtggattaacctggaggcgacctcgctgacgctgggtctgatatgggcgggcctcgggctgctgtatctgacgtatctgacccgccgcttccgcaagccgccgccgcagtttgacggcgccaaagcggaacaggcctgggaatcgtaacgattttttacgccgacacaaaggcaggcgattgagcctgccttcttttttgtcattctcgtttgaaatcaggcgctcgggaggagatagcaggggcagaaggtaagaatagtgaggacgtattatttctttttcttatgagttggcagctgtgcagagcgccgatccttcacataggagaccaggctgaagatggctactcccagcaaaaccaccgcgacgataaagagcaggatacctgacatagattaacctaatgttatgtttaacatgaagaaaaaataccgtgatatcgagataatagcatcgggatatttcttaaagatgacccgatgaatcagacgaaaatagactgccagcaatacactgaaattattatttacatgaataaatgtgaagagtaaagcaaaggcgtggtgaaaaaatgaacgggttacactcgtttaagcgaatttacagacgagagtcccacaggctgctacccttggcccgcttaaatagggttgagagtaataaatgtttaacaagcatatcatcggtcttattgggccgttgttgattctgacttcattgcatagcctggctgacgccgggcatccgtcaattcgtgaacgtattgtcgagcaggtgttaaaaccctgcgaaggaaaaaaagccggcgataaagtgcagatcgtcgaccatcgcggcggcaagcatgcggctatctgcacgctggcggcggtaccgctaccggagtaacgccctccctctgatttcagcctcccttcgttctggcggaaagcgtatttctttccgcactttgcgagccattgcccggaaaaatgtcataaatttgtcacaattaaggcgatgataatcactgactgaggattaagggatgagaaaaagtctactcgctgccgccgtgaccggcgttattttactctccgccggcgtccaggcgcaggaacaggcggcaccggaagggtaccagcttcagcaggtgctgatcatgagccgccataacctgcgcgcgccgctggcgaacaacggcagcgtgctggagcaatcaacgccgaagtcctggcctgagtgggatgtccccggcggccagctgaccaccaagggcggggtgctggaagtgtatatggggcactatatgcgcgaatggctggcgcagcaggggctggtgaccagcggcgaatgcccgccggagaacgcggtctacgcctatgccaatagcctgcagcgcaccgtcgccaccgcgcagttctttatcaccggcgcgtttcccggctgcggcgtgaccgtgcaccatcaggaaaaaatgggcaccatggacccgacgtttaatccggtgatcgtcgacgattccgccgcgtttagcgaaaaggcggtgcaggcgatggagaaagagcggcaggggatgcagctgagcgaaagctataagctgctggaggagatgaccgactaccgtaactccccgtcctgcaaagagaagcagcagtgctcgctgagcgacgcgaaagacacctttagcgccaaatatcagcaggagccgggcgtttccgggccgcttaaagtcggcaactcgctggttgacgcctttacgctgcaatattacgaaggtttcccgaaagaccaggtggcgtggggcgaaatcgccagcgataagcagtggcaggtgctgtcgaagctgaaaaacggctatcaggacagtctcttcacctcgccggaagtggcgcgcaacgtggctaaaccgctggtgaaatatatcgataacgcgctggtgggcgacgcggcgaaagcggcgaaagtcacgctgctggtggggcacgattccaatatcgcctcgctgctgacggcgctggattttaaaccttatcagctgcacaaccagtacgaacgtacgcccatcggcggcaagctggtgttccagcgctggcatgataagagcggccatcgcgacttgatgaagattgagtacgtgtatcaaagtaccgaacagctgcgcaatgccgatgcgctgaccctgcaatcgccgccgcagcgggtgacgctggcgctaaacggttgtccggtcgatgacaacggcttctgtccgatggacacctttaaaaaagcgatggccgaggccacgaagtagcagagtataaaaaacccggagcaatccgggtcttgctgccgatgtttagcctggtcttgtagcccgaacaggcgcaacgccccgcctccgggaagctcatgcaagaactcccggaggcggtactgcgtacctgtcccggctacacgttcttgcgttcgatagtttgttcgccccagaacagggagtctttgtcggttttggcgaaggcgaggggcaggacttcatcgctgccttcttcccagattttctccgccagcttttcatcgtaattggctaattcaaaaatcgcctcggcaatttcgggagacgtattgcgcagactggcccattcacccacgcggtgggcctttgtttcttgattcggcatgcttgtcctcctgctgaagattaaccgtgtaatttcactgccagacccgcaacgtgttgcccctgatagcgggcaatggctaattcttcttcacttggctggcgtgagccgtcgccgccggcaatggtggtggcgccgtaaggcgtgccgccgcgaacctgcgagacatcaaacagctcctgggcgccgtagccaatcggtacaataatcatcccgtggtgggcaagcgtggtccaggttgaggtgatggtttgctcctgaccgccgccggtaccggttgagctgaatacgctggccagtttgccgtacagcgctccggacgcccacaggccgccggtctgatcgagaaaggtgcgcatctgtccggacatattgccgaaacgggttggggtaccaaagatgatggcgtcgtactcagccagctcctgcggcgtggcgacgggcgcgttttgcgttttcccgcctgctttggcaaaaacctctgcctgcatggtttccggcacgcgcttcacgaccacttcaacgccatctaccttgtttgctccttcggcgacggcatgcgccatggtctcaatgtgtccgtacatggaataataaagcaccagaatcttagccatttgcatcactcctcggttgcgttatgagccagccagtcgactggctacctttaaagataagacctctggcgaagagtgcaaatgcaacaatcatttatttgatttataacaacattgctaacattcagggctgttgcaaaaagatacatcttcagcggcgctattttaggctgtcataagagtcgcttagcgcgcgtccggcgcaatagcggcagtttttatacaaaatctatttcagaatgtgacgatatccacccggcacggctttccttcgctaaccttaaaagcacgtgatacgcaacccgtatcgcggaggccagagcctcgtgtttcacctaatgcagcatgatgtctaacctaaatggaggtcagtaatggcaaaccatcgtggcggtgctggcaactttgccgaagaccgtgaaagagcatcagaagcaggtcgtaaaggtggccagcatagcggggggaactttaaaaacgatcctcaacgcgcttccgaagcgggcaagaaagggggcaaaaacagtcatggtagccgcgaaagctagcgcgccggattgttgctgatgggggttaatctcccgggcccgaccccatcaccctcgccgccgacgtcacgtcggcggttttttttccgctttgcaggttccgctaagcgggaggaacgcccggctcgcggcgtaaacgccttagccgggctacggggtgacgctgttttgtagccccggtaagcgcagcgcgaccggggatttcccggtacgggtctgctggcgttgcacgctttcataccggggtgacgttggtttgcccggcctcacgcggacggcggttaagcagagcgtggagcaggatcgcgccgaaggtggccgtcccgatgccgccgagggtaaagccgccgagcgaaagcgcgaagtcgcccgcccccagcaccagcgtcaccgctaccataatcagatttgcgttctggctcaaatccacgcggttctgcacccaaattcgcgcgcccgcgacggcaatcaggccgaacaccacaatcgatgcgccgccgatcaccggtcccggaatggtatggatcagcgcgccaaatttcggtgaaaacccaagcagcatcgcaatcagcgccgccgcgacgaacaccagcgtcgagtatactttggtgaccgccatcacgccgatattctccgcgtaggtggtcacgccgctgccgccaaccgagccggagagcatcgttgccagtccgtcgccgacgaacgcgcggcccatatacgggtccatattgcgcccggtcatcccggcaaccgccttcaggtggccgaggttttccgccaccagaatcaccgccacgggagcgatcagcatcattgcctggccgttaaaggtcggggcggtcatctgcggcaaaccgaaccacgccgcctgctcaagcaggctaaaatccagcggcttgcccagcccgaggccgttggccagcaatgcgtacagcgcgcaggcgataatcagcccgacgaggatcagcagccgctgcagcatcccgcgggtaaacaccgcgaccaggccgatgcacagcaccgtcagcaccgccatccagccgtcgaacggcgttgctgatacgctgcgtaccgcgatgggcgcgaggttaaggcctatcgccatgaccaccgcgccggtgactaccggcggcatcagccgctcaatccagcgggtaccgattttcatcaccaccaggccaatcagggtataaaccagcccgcagaggataatgccgcccagcgcgacgctaagatgcgggttaagcccctggccgttgaagccggtaacggcgatgaccacgccgacaaaggcagcgctggagccaaggtagctcggcacgcgcccgccggtaaccaaaaagaacagcagggtgccgatgccggacatcaggatcgacagattgggatccagccccatcaggattggcatcaggacggtcgcgccaaacatcgccaccgcgtgctgaacgcccatcaccacggtttgcccgaccgacagacgttcatcgggggccacgacgccggacgcggcggagggggaggttaactgccagcgaggaaaatcgaagagagccatgatgagatcctgggtttagggttaacaggctggacgcatcagcgtgtggtagccgcggtcgaaccacatcagtccgcgcggttccggatggcgtacaatcgccgccacttcgcaaaacaggatgtcgtgagttccgacgctgacgatctggctgatgcggcagtcgaagctgaccagcgccgcttccagacgcggacagccggtcgcgccggtttgccagtcggcggcggcgaagcgctccgccatcggcgttttaccgccgaaaaggttcgagagtccttcctgaccggccgccagggtattaacgcacagcgcctggtgctggctgaagatcggccataccgaggcggaacgattcaggcacaccagcagcgtgggcggcgcgtcggtaacgctgcagacggcgctggcggtaaagccggcgcggcctgcgggaccatcggtggtgatgatgttgaccgccgccccgacgtgggccatggcgtcgcgaaagctttgtttatcggcagtagacatacgggctccttatgccagctggcaggcatcatcaaaaggcagacgcggcaggcgagcgtacagcttgccgggatcgccgtagccgatattaatcagcaggttgcttttccaggcgccgtcggcaaaaaacgccgcatcgactttttcgcggtcaaagcccgacatggggccggtgtccagacccagcgcgcggcaggcgaaaatcaggtacgccgcctgcaatgaaccgttgcgaaaggcggtctcttccaccatctgcgggctggaggtaaaccagctgcgggcgtcgccgtgagggaacagctccggcagccggtcatagaacgcgctgtcccaggcgacgatagcggtgaccggcgcctgcagggtcttcgcaacgttgccgctcgacagggccgggcgcagcttctctttgccttccggtgtgcggatgaaaacgaagcgcgccggggagcagttagcggaggtcggtcccattttcagcaaggcgtagatttcacgcagctgctcgtcgctgaccggcctgtccagccagccgttgtgggttcgggcctcggtaaacagcgcggcgcaggcggccgggctaatggcttcgctcatagattctcctgggggacgggcagcatcgcggccagcccgtcgcataaaatagggttaaaggtggcggtatcggtgacgttgcaggcgtggccgccccaggccatttccgccagctggctgccggggattgccgcctgcagcacgcgggagcaggaggccgggaccagcagatcgtcagcggcgctgataatcagcgtcgggcaggttatcgctgccgcccgccgcgaaaagtcggcctgcttgagggcgttcagccttttcagtaaattctctttgccctggaaatggctgatggcgagcgcgtcttcggcctccagccgcggcaggcgagaggccatccactccgccggatagaggaacagcggctgcgcttctacccacgcctgcgcgccgcccgcgtgcagcaggcgttcgcgcaccagaaagcagcggcgggtatgcggggagagcgtcagccagccgttcaccagcaccagggcgcttatcgcttcgggatggtccagcgccagctgcagaccgatcagcgcgcccagggcgtgaccgaccagcgcaaaacgcacaatccccgcctcctgcagcgccgcgttaagctcctgcgccatggccgccatgctgtagccgacgggcagcgggccgccgttttcaccggtgcctttatggtcatagctcaccagctgatagtgcggttcgagcgccgcccgctgcggtagccagtagccgcccgcgccgccgagcccggcgctcagaaccaccaccggcgcgcccggataaggtgccggggagacatttagcttcatcatgccggcttcccgatatgcgcgacggtggctatttccaccagcgcatcgggcttcaccagcccgcactgaatgcagaaacgcgccggtttgtcgccggggaagaactccgcgtagacctcattaatcgcggcgtagtttttccagtcggtgataaagatgctgttgaaggtcacatccgtcatactgccccccgccgtctcgataacgctcttgatggtttccagcacgtggcgggtttgcgcctttgggtcgccgatataaaccacgttgttttgcttatcaaacggcagggtgccggagacgtaaaccacgccgtcggccagcgtgcccgggacaaacggggcgataggcgtggtggtgcctggcggaataatcacctgtttaggcataacgtttctcctcggaaaaggcgcgcggcgcggcgggctcaagggcggtacagaagctggcgacatcgctgacccagccaaagaaggtttcgatattgaacagcgccgcctgctgggcgaacgccggaccggcctgatgggtagcgtcttccagcacgataccgaaatactcgaggaagaagccgtcgcgcagggtcgattccacgcagacgttggtggcaataccggtaaagatcagatggcggatgccgcggctgcgtagaatgctgtcgagcgcggtgttaaagaagccgctgtagcgcggtttcggcagcacgatatcgccgggctgcggcttaagctgatcgaccagctgatagtcccagccgcctttcgccagcagcttgccctgcagctccgggttctttcgcatggttttcagcgcgttggatttatgaaaattcggcgaaccggggccgccggcctccacgtactggtcgtcccagccgttctggaaccagataatcagcatcccggcggcgcgcgcggcggccacggcgacgttgatattgtcgataaccgggcgggtggcggaaacgtcaaatccggcgaggtcgagatagccgccctggctggcgtaggcgttctgcatatcgacaacgatcagcgcgctctgctgcggcgcaaaggtcagggattccgggcgagcgggcagggtaatcatcaggcaacctcttgagtcatggtggcgatatggtcgcggcagcgcatcagcggctgaatgcgctgaccaaaggcttcgataccgataaggaaatcatcaaacgtcagcagcacgccgtcggtgccggggaccgccgccacttcgtcgagcatgcgggcgacgctggcgtaagagccgacaagggtgcccatattgatgttgaccgccgaggtgggatcggccatctggcgcacgttggtgtcgctgccggagcgggtgtctttctggctctgttcggtgagccacgccagcgcttcgtcatcggcgccggctttgtaatgctcccatttggcgcgggccgcctcgtcggtttcgtcggcaatcaccatgaacaggacgtaggaaccgacgtcgcggccggttttttccgccgcctccatcatccgcgcggcggtgggggcgaaggcggcaggggtgttgacccctttgccgaagcagaagttgtagtcagcgtgccgggcggagaacgccataccggcgtcgctttgcccggcgcagatcactttcatcggctgcgacggctgcgggctgacgcggcagtcgttcatggtgaagtagtcgcctttaaagtcgctgcgcccggttccccacaggtcgcgcaggacctggacatattcggtgagatagtcgtagcggctggcgaagtagtcgtcgcccggccagatgcccatctgctcgtattccggcttttgccagccggtgaccagattgacgccaaagcggccgccggagatagagtcgatagtcgaggccatgcgcgcgacgatcgccgggggtagcgtcagcgtggcggcggtggcgtagatctgaatgcgcgaagtgacggccgccagtccggccatcagggtgaaggactccagattatgatcccagaattcggtcttgccgccgaagccgcgcagtttaatcatcgacagcgcgaaatcgaagccgtagtgttcggctttttgcacgatggccttattgagctcaaacgtcggcatgtactggggagcatgggtggaaatcagccagccgttattaccaatcggaacgaagacaccaattttcatacctacctctctgcatgtcgttgaacaagaaggcgcggcgctgcatcctgcatctccctcaatcacctcgcctgaaagataaagcaaaggcgatgccagttttgcaaaggctaatgttattaaggtgttgctggatggttgctgaaaatagcagcaataaaagtggactgaatggtcaaaatcggtgcacgaaaaaaccgcagtcgtgcgcaatcagggtgcagagagtcgtgtcggcgctgggcttttgctatgctgatggcgtgaaaagaaggagataacgaatggcacagggcggcgtgaaaaagatcggcaaacgctcacaggcggtgagcgcgaaaaaagaggctatcctggccgccgcgctggacgcgttctcgcagtttggtatccacggtacccggcttgagcaggtcgccgaactggccggggtatcgaaaacgaacctgctctactactacccgtcgaaagaggcgctgtatattgccgtgctgcagcagattctggctatctggctggcgccgctaaaggcctttcgcgaagatatcagcccgctggtggccatcggcgaatatatccgccttaagctggaggtttcccgcgatcacccgcaggcgtcaaggttgttctgcctggagatgctgcagggcgcgccgctgctgatgggcgagctgaccggcgatctgaaagcgctggtggatgaaaagtcggcgattatttccggctgggtcgagagcggcaggctggcgccggttgacccgcagcatctgatctttatgatctgggcgaccacacagcactacgccgatttcgccactcaggttgaggcggtaaccggcgcgacgctgcgcgatgaggcgttttttcagcaaaccgtcgataacgtccagcggatgattatcgaagggattcgcgtacgttaattggcgggcggcagcgggcagctctgatcgccatcctcgcactgcagcagcgaggcgaggaacgattcgcgctcgacggttttatcggacatgcactggttgatcagcatcggctgtacgctgccgccttcagcgccggaggcgaggaattgacagtcggcgtcgcgcagggcaatccacgacagctgcgcttttttcagcaactcctgctgcttgccggaggcgcgcttcagcgcttcctggtacgtttcatttagttttttgtcgtcagcctggtaccgctcggcggtgcactggttcatttccgtttgattgctggcgttgctgcattcgtccgccagcgcatgggtgcttgccagcagcgcggcaaaagcgagtaaagtgcgtttcattggtcaactcccataaaaaaagctcccgtccgggagccttaattaaccacagcctgcgtctggtgtcattagctgacgttgtgccgtctgctttcccgggggcggcgcaaagcgccttgcccgggctactgatagtgcgggctgtggttgggtagcccgggtaaggcatcagccgcaacccgggaagcaggcttagccaatcgtcatcaggctggcgttgccgccggccgcggcggtattgacgctgagcgaacgttcaatatagaggcgctccagcagcagattgctctcgccgcgggcgaagccctgcaccgacacgatcgcgccatcgcgcgccgccacctgttcgcacagttcccgcagctgatcggaatcgccgtggtagataaccgcatcgaaaggctcggtcgtcagggtttccgctttggcgaagtggatccgcgcgctgacctcacgcggcagctttttcgccagctcgcgctgcagaggggcgtccggccacagcacttcgcagccaacggcggtcacgcccgccagctgggtgagcgcatcctgctcattatcggccacgcacagcacgcggtcgcgcggcataaaggtcagggtgttgcgctcgccggttggccccggcagcagacgctgggttccggcctgcgcctgctcgctgaactgctggcacaaagcctgcagctccgggcgatccgccgcccactgctgtaaagcgaccagcggtttttccagcagcgtcttcagctgcgcgtccagcggatactccgcgtcctggcgggcgagggtaatcccgacggcgttctgcgggcggctggagagcagccgatacagatacagcgggccgccggcttttggacccgtacccgacaggccctcgccgccgaacggctgcacgccgaccacggcgccgaccatattacggttgacgtacaggttgccgacattggcgctgccggtgacctgagcgatggtttcgtcaatacgggtatgcacgccgagggtcagaccgtagccggaggcgttaatctgtttgaccagcccgtccagttcgttgcggttatagcgcactacgtgcagcaccgggccgaagacctcttttttcagttcatcgaagctgtcgagctcaatcagcgtcggcggaacgaaagtaccgcaggtccactcgcgggaatcttcgctgttttcgcgcaccgcctggaagactttgcgcccttttgcgcgcagcgtctggatgtggcgctcgatattctctttggcttcggcgtcaatcaccggcccgatatcggtggtcagacggcccggattgcccatccggcactcggccatcgcgccgcgcagcatggtcagcgtatgatcggcgatatcatcctgcaggcagagtacgcgcagggcggagcagcgctgccccgcgctgtcgaacgccgaggcgagcacgtcgacaaccacctgctcggttaatgctgaagagtcgacgatcatcgcgttcatgccgccggtttcggcgatcagcggcgtcggacgaccctgagcatccagccggctggcgatattgcgctgcagcagggtggcgacttcggttgagccggtaaacatcacgccgcgtacgcgctcgtcggaagtcagcgcggcgccgacggtttctccgcggcccggcagcagctgaataacgcccggcggtacgcccgcttccagcaggatcgccacgccctgagcggcgatgagcggcgtctgctcggccggttttgccagcacggtattgcctgccgccagcgcggcggcaatttgtccgctaaagatcgccagcgggaagttccacgggctgatacagacgaccgggcccagcgggcgatgggtttcattgtcaaaatcgttgcgcacctgaccggcgtagtagtggaggaagtccaccgcttcgcgcacttcggcaatcgcgttgctgaaggttttccccgcttcgcgcaccaggatgcccatcagggtcggcatctggccttccatcagcaccgcggcgcgttcgaggatcgccgcgcgctcctgcggcggggtggcgaaccagattggcgcgttgttaaccgcgctggtcagcgcctgctgaacttcgtcctcgctggcttcgcgcacgtagccgacgatatcttttggctccgccgggttcacgaccgcctgcatttcgccttcggccaccgggtgctccagcatcggcagcgcctgccatttatgcagcgcgctgtttaataacgaggaggagagggaggccagacgatgctcgttggcgagatccagaccggctgaattgctgcggtctttgccgtaaaggtcgcgcggcagcgggattttcgggtgcggaagacccacctggccctcctgctgggccagtttttccaccgcggcgaccgggtcggcaaccagctcatccagcggcagggtgctgtcagcgatacggttcacgaacgaggtgttggcgccgttttccagcagacgacgcacaaggtaggccagcagcgtttcgtgggtgccgaccggcgcgtagatacggcacgggcggttgagtttgccatcggcgactttaccggtcacctgctcgtacagcggctcgcccatgccgtgcaggcactggaattcgtactgtcccgggtagtagttctgtccggccagctgataaattgccgccagggtgtgggcgttatgggtcgcgaactgcggatagatcaggctcggcaccgccagcagctttttcgcacaggccagataggagacgtcggtgtagaccttgcgggtatagaccggatagccttcgagaccgtccatctgcgcgcgtttgatttcgctgtcccagtaggcgcctttgaccagacgaatcatcaggcggcgacggctgcgggtcgcgaggtcgattaggtagtcaatcatgaacgggcagcgtttctgataggcctggatcacaaagccaatcccgttccagcccgccagctccggttcaaagcagagtttttccagcagatcgagagagatctccaggcgatcggcctcttcggcgtcaatgttgataccgatatcgtactggcgcgccagcagggtcagcgatttcaggcgcgggtaaagctcttccatcgcgcggtcgtactgggcgcggctgtagcgcgggtgcagcgcggagagcttaatcgaaatgcccggcccttcataaatgccccgtccgttggaggctttgccgatggcgtggatcgcctgctggtaggagaccatataggcctgggcatcgtcggcggtcagcgccgcttcgcccagcatatcgtaggagtagcggaagcctttgtcttccagcttgcgggcgttggccagcgcttcgacgatggtttcgccggtgacgaactgctcgcccatcaggcgcatcgccatatcgacgcctttacgaatcagcggttcgccgcttttgccgataatacggttcagcgagcgcgacaggctggtttcgttgtgggtggagaccagcttgccggtaaacagcagcccccaggtggcggcgttgacgaacagcgacgggctgcggccgatatgcgactgccagttgccgttgctgattttgtcgcggatcagggcatcgcgggtggctttgtcgggaatgcgcagcagcgcttccgccaggcacatcagggccacgccttcctgcgaggagagcgagaactcctgcagcaggctctgcaccattccggcgcggccgctggcggttttctgattgcgcagcttctccgccagctgataggcgagcttgtgcgcctgttcgccgagagtctgcggcaggcgagcctgctccagcagcatcggcacggcgtcggtttcggcccagcgccaggcggcggtgatcgacgcgcgggaaacggactgcggcaggatctgctcggcgaaatcgaggaagggctgataaggttcgtcagccggatgaccggcctcatcgctttcgttcgccgcgccggacagcagcgccggcagctccggcagcgtctcgtcgttttccagcttttccagatagttgaaaatggcctgtttaatcagccagtgcggcgtgcggtcaatacggctcgccgcggatttaatgcgttcacgcgtcgcgtcgtcaagttttacacccatggtggtggtgcccatgtcaggaactcctgtaatagaacgtcttcgtgccaagatgaggttgcgtagaaatatctaccatgttgcaactttgtgcaaccttgttaattgagaattgtgtggcaggtagaaaaacgccgtgaatgttaaaaatgatgatgaaaatagcaggtatttatcccctgtctaataaggtatttctatgcgtcacttaacacttttgcgtggtgcaaccgctaaaaacgtgagagagtgcaacctataacaaaatgaagtttggtcccggaagcatttcgtgtaaatgctgtgttaaatcgtttgtgaaaaaacaaagcttccgtcaggatacggtcgcccaatacaaccaataggccattgccccgttccggtagtggataaaacgacaaatttggatgctgtcgacaaaaattctggagatttttacatggctattagcacacccatgttggtgacttttattgtttatatttttggcatggtactcatcggctttattgcctggcgctcgacaaagaactttgatgattatattctcggcggccgcagccttggcccatttgtcaccgcgctctccgccggagcctccgatatgagcggctggctgctgatggggctgccgggggcgatatttatttccggtatttccgaaagctggattgccattggcctgacgttaggcgcatggattaactggaagctggtggcggggcgtttgcgggtccataccgaggcgaataataacgccctgacgctgccggattatttcaccggccgttttgaagacaaaagccgcgtgctgcgaattatctcggcgctggtcattttgttatttttcaccatctattgcgcttccggtattgtggccggcgcgcgtctgtttgaaagcacctttggcatgagctacgaaaccgcgctgtgggccggggcggcggcaaccattatttatacctttgtcggcggcttcctcgcggtaagctggaccgataccgttcaggccagcctgatgatattcgccctgatcctgacgccggtgatggtggtgatttccgtcggcgggtttggcgattccctggaagtgattaagcaaaagagcattgagaacgttgatatgctcaagggcctgaacttcgtggcgattatttcgctgatgggctggggcctgggctattttggtcagccgcatattctggcgcgctttatggcggcggattcgcatcacagcatcgttcacgcccgtcgcatcagcatgacctggatgatcctctgcctggcgggtgcctgttccgtcggcttcttcggtattgcctacttcaataacaacccggccgttgccggtgcggttaatcagaacgccgaacgcgtctttatcgaactggcgcagattctgttcaacccgtggattgccgggatcctgctgtcggcgattctggcggcggtgatgtccaccctgagctgccagctgctggtgtgctcaagcgccattactgaagatctgtataaagcgtttttgcgtaaaaatgccgggcagaaagagctggtatgggtaggacgctttatggtgctgctcgtcgcgttaattgcgatcgccctggcggccaacccggaaaaccgcgtgctgggtctggtgagctacgcatgggctggctttggcgcggcgtttggcccggtggtgctgttctcggtgatgtggtcacgaatgacccgtaacggtgcgctggccgggatgatcatcggcgccttaacggtcattatctggaagcagttcggctggctgggcctgtatgaaatcatcccaggctttatctttggtagcctggggattgtggtcttcagcctgctgggtaaagcgccctccgccgagatgcagcgacgcttcgccgaagcggacgcccattatcactccgcgccgccggtgcgcgcgaccgccgagtaatcctctgcaaccccatcaagcccgcgtaatgcgggctttgttatttatgcctcttgctaatggcttgaaaatacgctgatatctcagcacaaataacaatgagggtagcaaaatgagtttcaaacagggtgcagtggcgctggtactggcagggatattaagcggctgcgtagcgcccgccgcgaagacggctccggcggcggacgctaacgcctgcccggcggataacgccatggtgcaaaccacgctttatttcggcttaagccgtccggccgggaaggatattaccgcgcaggagtggcagcagttcgttgaccgcgacgtgacgccgcgctttcgcgatggcctgacggtctttgacgcgcgcgggcagtggctgggcaatgacggtaccgtggcgcgcgagcagagcaaagcgctgatgctgattcatggcaaagatgcgaagagcgaagaggggattgaggcgctgcgcacgacctataaatcacgctttgcgcaggagtcggtgatgcgcgttgaccagccggtctgcgtacatttttaatttgaatcaggtgatattcccgggttgcggctaacgccttacccgggctacatagctacgcgggcctgttaccccggggtaacaggccaaacgcgcttcggttacagtaccagccccgcaaagctggcggagagcaggctgaccagcgttgcgccatacaccaggcgcaggccgaagcgggaaacgatattcccctgctgctcgttcaggcctttaatcgccccggcgataatgccgatagaggcaaagttggcgaaggaaaccaggaacacggataaaattcccagcccgcgcggcgtcatgctggcggctattttttgcagctcaatcatagcgacaaattcattggccaccagtttcgtcgccataatactcccggcgttcagcgcatcgctaagcggaatgccaatcagccacgccaggggataaaagacgtagccgaggatctgctggaagctcaggccaaatatcgtggcgaacagggcatttatggcgctaattaaggcgataaaaccaatcagcatcgccagaataatcatcgcgactttaaaaccggccagaatatattcaccgagcatttcaaagaagctctgggattcatgcagtttttcaagcttgatctcctcctcgctgcccggacgcgtcgggttaatgatcgacagcacaataaaggtgctgaacatattcaggatcagcgcggcgacgacgtatttcgcgtcgagcatactcatataagcgccgacgatggagagcgacaccgtcgacatcgcggtggccgacatggtgaacaggcggcgggaagagagatcgccgagcacgcctttataggcaataaagttctctgattgaccgagaatcagcgaactgaccgcgttgaaggactccagcttacccataccgttaacctttgacagcagggtgccaatcaggcgaataaaaattggcagaatacgccagtgctgaagaataccgatgagcgcggagataaagacaatggggcacagcacgccaaggaaaataaacgccagccctttttcactcatgccgccaaatacaaagttggtgccttcggcggcaaagccgagcagtgattcaaaaaaggatgcgatatttttcactagccacaggccgctttcggcgtggagaaaaaagaaagccagggcaacttcaataataattaactggataatatagcgaatgcggatttttttacggtcgtagctggcaagccaggcaagggcgaggataaccaccagcgccagcaggaagtgcaagaattgagtcatgtcgtttatttcgcaggtcaataaggccgccatttagccacagccgggcagccgggtaaatatctggcgcaaaaaatcccgtcctcctgcccgaggggcctgggttgcgagataatcgcgcaagtcattatttgttcgcgactgatttacaaatcgtcatcattcactccacatttcacttgtgtttctgattattgtaatgataatcactatcataaatatttacctatctttgcatcagttgactgcggttcacatttaagggtgttggcatgtttgtcccatttctcatcatgttacgtgaaggcctggaagctgcgctgattgtcagcctgattgccagctatctgaaacgcacccagcgcggtagctggattggcgtcatgtggattggggtgctgcttgcggcggcgctgtgcctgggcctcggaatttttatcaacgaaaccaccggcgagtttccgcagcgcgagcaggagctgttcgaaggcatcgtggcggtggtggcggtgtgcattctgacctggatggtgttctggatgcgtaaggtgtcgcgcaacgtcaaacagcagcttgagcaggcggttgataatgccctccagcgtggaaataaccacggctgggcgctggtgatgatggtttttttcgccgtcgcgcgtgaaggcctggaatcggtcttcttcctgctcgccgctttccagcaggatgtcggaatctggccgcccatcggcgcgatgctcggcctggcgacggccatcgttttagggttcctgatctactggggcggcatccgcatgaatctcgccgtctttttcaaatggaccagcctgtttattttactggtggccgcaggcctcgccgcgggggctatccgcgccttccatgaggccggactgtggaaccatttccaggcggtcgccttcgacctgagcaacgtcatttcgacgcacaccctattcggcacgctgctggaagggatcttcggctatcaggaaacgccgaccgtcagcgaagtggcggtctactttatctatttgatcccggcgctggtgctgtacgtctcgccgccgggtaaaaaaaccaccgcatcccgggcagcgtagtcgggcatcgcggattgcaatagtgacaacatacttatcgaaagggatggtcatgatgaatcattttcgtcgtaatgcgctgcagcttacgcttgctgcgctgttcagctcggctttttacgcccaggcggccgatattccgcaggtcaaagtgaccgtcaccgacaaacagtgcgagccgatgaacgtcaccgtgaaggcgggtaaaacccagttcatcattcagaaccacagccagaaagcgctggagtgggagattctgaaaggggtgatggtggtggaagagcgggagaatatcgcccccggctttacgcaaaagctgacggccaacctgcagccgggtgaatatgatatgacctgcggcctgctgactaacccgaaaggcaaactgacggtgaccggcgaggcgaccaaagatgccgccaaagccgatgcgctgctcagcctgggtgaagctattaccgcctataaagcctgggtcaccgccgagaccgcggagctggttagcggcacgaaagcctttaccgatgcggtgaaagcgggcgatatcgagaaggcgaaagcgctgtacgcgccgacgcgccagcactatgaacgtattgaaccgatcgccgaactgttctccgatctcgatggcagcattgacgcccgcgaggatgactacgagaaaaaagccgaagatccgaaattcaccggcttccaccggctggaaaaagcgctgtttggcgataacagcgtcaagggaatggataactatgccgatcaattgaacgctgacgttctcgagctgcaaaaacgcattagcgaactggcgttcccgccgtcaaaagtggtcggcggcgcggccggtctgattgaagaagtggccgccagcaaaatcagcggcgaagaagatcgctacagccataccgacctgtgggatttccaggccaacattgacggcgcgcagaaaatcgtcgacctgctgcgtccgcagctgcaaaaagagaacagcgcgctgctggcgaaggtggatgccaacttcaaaaaggtggacgccattctcagcaaataccgcaccaaagatggctttgagacctatgacaagctgacggatgccgatcgtaacgcgctgaaaggcccgatcaccacgctggcggaagatttggcccagctgcgcgggatcctgggtctggactaaggcgatggctgagcaaaaatatgatgttaatcaaccgtcccggcggcggttgttaaaagggatcggcgcgcttggcggcgcgctggcgatatccggcggctgtccggtggcgcacgcggcaaaagacaatagctctccgggcacggtgtcgccggatgcgcgtcaggaagcgcagccgttttatggtccacatcaggcaggggtgctgaccccgcagcaggcgtcgatgatgattgtcgcctttgatgtgctggccagcgataaagcggaccttgagcggctgtttcgcctgctgacccggcgtatcgcctttctgaccaaaggcggtcccgcgccggagacgccgaacccgcggctgccgccgatggactcaggcattctcgggccgtggatcgccccggataatttgacgatcaccgtctcggtggggcattcgctgtttgacgagcgtttcggtctggctaatcatgcgccgaagaggctgcaaaagatgacgcgttttccgaacgattcgctggatgcggcgctgtgccacggcgatctgctgctgcaaatttgcgccaacacccaggatacggtgattcacgccctgcgggatgtgattaagcacaccccggatttgctcagcgtgcgctggaagcgggaagggtttatctccgacagcgccgcgcgcagcaagggtaaagagacgccggtgaatctgctgggcttcaaagacggcaccgcgaatccggtgagcaccgataaggcgctaatggataaagtggtgtgggtcaccgccgaccagggagagccagcgtgggcgacgggcggcagctatcaggtggcgcggattattcagttccacgttgagttctgggatcgcacgccgctgaaagagcagcagactatttttggccgcgataaactgagcggcgcgccgcttgggatgcagcacgagcacgatgtcccggattacagcaaagaccctgacggcgataccattgcgctcgatagccacattcgtctggcgaacccgcgtaccccggaaaccgaatccagcctgatgatgcgccggggctatagctattcgctgggggtgaccaattccggccagctggacatggggctgctgtttgtttgctaccagcacgatctggaaaaaggcttcctgacggtgcaaaagcgcctgaatggagaagcgctggaggagtacgtgaagcccattggcggcggctatttctttgttctgccgggggttatcgacggtcggcattatctcgggcaatcgctgctcgaagcctgacgtacctgcccgcaagggcagggcgttttctgctgtttttccattcattttttgtatttcctgccttgtttcatttttctgtaatcttatagtcggaaactctcctcagctgcgatgagaattatttgttgtctgtgtgtgaaaaataagttgcgcttagaattatttctgatgtacttattacaggcgcggtagttctcggcagtagtctcgtttcattatggagatcgcgaatgcccgattgctgtaacggaaaacgtcaaaccccagaccgtacttatcagcacgggagcccaacttccggccgcgattttcacaccgcaaaatccttctcctctatcaaagaaaaccagaacccaggcaaggttaccggtgcgcgtagccgtgaccctctgccaattcgtcaggcaagcaatggcttacaaggaagccaaacctcaatcgttagtgcgcataatcgcgtcgatcgtggcgcgtgtgatgtaaaccaacaacgcaaggtgctatccatgggaagacaaaaagcagtgaccagagctcgtcgtgaggccaaacgtgtgctgagacaggattcgcgaagccataagcagcgcgaagaagaatcggtcacatcgcttgtgcaaatgagtggcgtagaagccattggcatggcgcgggatagccgcgacgcatcgccaatcgaagcgcgcaatgacgctcaggcgcattatttgaatgccatcgacaataaacagctgatcttcgccacgggcgaggccgggtgcggtaagacctggattagcgcggcaaaagcagctgaagccctgatccataaggatgtggacagaattattgttacccgtcccgttctgcaggccgacgaagatctcggcttcttaccgggagatatcgccgagaagtttgctccctatttccgaccggtctatgacgtgctggtgagaaggctaggggcttcctttatgcagtactgcctgcgtccggaaatcggcaaggtggaaatcgcgccgttcgcctatatgcgcggacgtacatttgaaaatgcggtggtgattctggacgaggcccagaacgtgaccgctgcgcaaatgaagatgtttttgacccgcctcggggagaacgtgacggttatcgtcaacggcgacattacccagtgcgatttaccttcaggcgtacggtcgggtctgaccgatgcgctagcgcgttttgaagaggatgagatggtgggtattgtgcgctttacaaccgatgattgcgtgcgctcaacgctttgccagcgtgcgctgaaagcctactactgagttcttctgcgtctgcaaagcccgggtgaccgggctttgtttttgctgcactacagaagagcctgcagtgaaggagcggccatcgtggcttcaaaaggaacgatctcgactttcgctacgcccgattgctgaaatggatcccggctcagccagttttgcagcccatccatatcatcgcctttagccagaatcacgccgccggacctggggattttacgccccgaagcgagaaatattccgtcagcatagccttgctttagccattccacgtgcgcagcaagctgggcgtctacctgatcaagcggtttaacgtaagtcagaacaacaacggcaatggtgctcattttccttccttaacatttaaatgtaacgctgcagaagcttatcattcacgtgaacagggcttcaggtttttttaatcaactgacgcggtgggtgtctggacgagcgcgggagcgattaaaatgtccaggtgattgccgcggtcacggaaccttcattgcgccgtgagactatcgggctgtcagcggcgtgttctccgagccaggtatagccggcgctgagcgtggaaccccaatgctcgtcatattgatggctccaggtcagcgcgttgtcgatgccgtaaaatccgccgggtgcgcgataggggcgatagccggaacgggcgctctgccgttgatcgaccccgtaaaaggtattggcgtaccggccgtcgccaaacagcgcggcggactgtaaggcaacgatatcctgcgagttctggagcagcaggagggttgcggaggtctgataatgcacgccctgggcgtcggtgagcggaagcgtagccttaccttcaacggtgagccacggcgtgaccgaccagccgacggcgaaggcggtattcatggtggctttaatattacccatccccttcagcgtattcgccccatcgcgccagcctgagtttttttccgctcgcccgaggtcataaccgagcgtgtgctcgaagtagagaccgctgtcgccagccaggtcatagcctatgcctttttgactatcaataaagaaagcgcctttccgcccctgtagtacgggaaccacctgccaactctgcttgtcagagccgctgtaacgaggcgcgtattttccgcccaccccgatagtcagcccatcggaaggcgcggcggcttcatcggcacgcgcgccgggtgttatcgccattaaaaacggcacgaccatatacggcgaaatttttctggctatcatactgttctccacgtggacgcgggcgccgtcgataaggacgcgccgcagaatgccggtgcagtatggttttgctaaatcaatgaacggtcgggatagtgttaagaaacggtcaaggtgaacagatgttgtccagaagagtgttgataattgaagatgacgccgatgcggccggggtgcttgaggcctatttacgccgggaaaactatgatgtggcggtcaccgtggatggcctcgctggactggatatggcgcagcgctggaaacccgatctgattctgctggacgtgatgctgcccgggctgaacggcaccgaggtgctggccagcctgcggcggaaaagcgatgtgccggtgattatggttaccgcgatgggggatatgcccgatcgtattggcgcgctgcgctatggcgccgacgattatgtggtgaaaccctatcatcctggcgaggtggtggcgcgagttcaggccgtactccggcggagccgcaaagcggagacgcaggaagacattctgcgctggcaggggctggaggtggacgtcgctgccatcgtcgcggccgtcagcaatccgggggaatctgtccatgttctcgatcttaccccgaccgagttttcgcttctggctacgctgatgcgcgcccccgtccgtcccttttcgcgacagtatctgctggagcgctgccttcctgagagcgaagcgcttgagcgcgtggtggatacgcatatctataacctgcgtaaaaaactggagggggcgggggtatccggggtgctagtcaacgttcgcggcgtgggctacaggttcagacagccatgatgaagacccgtcactcctctctctggcgctggatttgcgggcgcattctggcgctggccatcggcagcgtgattgttatcgccacctgtatgtggctgcgtttcgccgtgcagaactattggatcatgcacaaaatgccgcccgctttgcgggaggaattcattgcgctcagccgcaatccggaggccaacccggcgcgttttcatcagattgtcgatacctggtggggattgagctattccacgccctctatcgcctcggcggactgggtgaccgtggcggtgctggtgctggtcatgatccccttcattgtcgttatggggctccgctatgcccgtccgctctcgctgcagttcagccgtcttcgtgatgcggcgaaggacgtcaccggggggcaatttggccgccaggcggagctgattgaggacgcgccagcggaaatgatccgctttgctgccgactttaacaaaatgaccggccagctggcccgctatgataaagaactccgcgcctcgcatgttgcgatggcgcatgagcttcgctccccgttgacggcggcgattggccgtctgcagggaatgctggatggcgtttttgatacccagccgcagcagctggagatggtgatgaaacaactccagcatctgaatcgattaaccgatgagctgcatctgctttccctggcggatgccggcaatctggtgctcgatgagcggctattttgtctggatgagctccttcaggagcgagccgcatggttaacgccgcaggcggacgcgcagagcgtgacgatcgccattcagccatcgccgtcctgtcccttccgcggcgatgcttttcgcatgggccaggtatttagcgtactgatggaaaatgccgtacgctacgggcgcagggggggacatctggcaattacgctgcgccgcggcgagggcgcttacaccattgattttgtcgatgatgggcccggcgtggcgaggcattttttaccggaaatgtttgaacgttttacccgcgaggaggcgtcccgcgccagacactccggcggcagcggcctcggattatccattgcgcgcgctatctgcgtggcgcacggggggcgcatcagcgcgtcgctaccggcgagcggcggtctgcagattcgcgttgttctgccgtacgctcccgccacagaagaaaacagcctgccttgataatcccttgacacaacatcgagccattctcgatgaatgtgtcatgtaatggcgccatttcccgaacggagtggcgtttatgttatatgagttagttctttcccttcgtcagtgcgtgtccgctttgctcggcgcagaacggacgctatcctggtttgcgctgttgccgccgatcgtactggtcctgatgatcgtaccgcttgtgggctgcggcgataaaagcgccgaaaagcccgcgccggcccgcccggtgcgctacgtggtggtgggttccccggcgacgcttcccgctctggaaagaacgggcgaaatccacgcgcatgatgagacggccctgagctttcgtacggcgggcaggatgctgacgcgcgcggtggatgtcggcgatcgggtcaactacgggcagctgctggcgacgcttgaagagaccagcgcgcgaaatcagctggacagcgcgacggctgacgatgagagcgcccgagcgaccgcccgggtcgccgcgctgaacgttaaccgcatgcagaagctcatcgccacgggcgcaatcgcccgctctcagctggacagcgcgcaggcggactggctggtcgccagcgcccgggtgaagagcagcgaggccgccttgcgcaacgccagggaaagcctgggctggacgcgtcttacttcgccgggtgagggggttatcacggcggtcagcgcctctcccggtcaggtggtcagcgccggagagacggtggtgacgctggcggcgggtcaggcgcgcgatgtggtgtttgatatcccggatcccgctaaggttgaggcgcaaagggcggaagaatttcaggttgctttgctcagcgatgccggggtgaaggcctatgctgttttgcgtgatattagcccacaggccgatccccagacccggacatggcgcgtcagggcaacgctcaagaaaccgcccgccgcgatggcgctgggcgccagcgtcacggtaaggctgccgtcatcaggctcgacgggatacgccataccggcttctgcgctgagccgctgcggagataaaccggccgtctttgtcatcaccccgcagatgcaggcgcagctgcgcgttgtcgttcccgccagctacacggcttcttccgcgatcatcgcctccggccttgtgcccggcgaccgggttattaccgccggcgttagcaaactgcgcccgggcgaaaaagtcgtcgccggagagaggctgccgtgaaaatagcgccgtcaaaaaatcgctttaacctttctgcatgggcgctggaaaacccgcaaatggtcagtttctttatgctgctgattatggttatcggttcgctcagctatacgctgctgccgcgaaatgaagatccggctttcactatcaaaacggcggtagtctcggcgcagtggccgggcgcgtcggtaacggataccacgcatctggtgacggatgtcctggagaaaaaattacaggaaacgccctggctcgattatatcgaaagtgaaacccgagccgggcaaacggttatctatattaatctccgcgatgacaccccggcgcacaacgtcccggcgatctggtaccagatccgcaaaaaaatgcaggatattgcgccatcgctgccggaaggcgcgcagggaccgagcgtgaacgatgagtttgacgacacgtacggcaccatttacggatttatccctgacggatatagccttgaagaggtgcgacagcgggtggagacgatccgccgtgaactgatgtccgtgccggatatcggcaaaacggtcctccttggcgagccgcaggagcaggtagtcatcgctttttcacccgcccggctggccggtatggggcttaccattcagcaggttgcggacgctctgaaggcccagaatgccgtggtgccggcaggaaccctgcgcaccgggcaggagaatatcacgctaaacgtcagcggggccctcaggaccgaagcgagcctgcgcgccgtcatcctgcacatcaacgatcgctatcttcccctgaccgatattgccacgattgaaagaagcgcggccgaaccaccttcagcggagtttcgcgtcaacggacgtcctgccgttgggctggcgatttccatggcgccgacgggcaatatgctgcgctttggcgagacgctgaataacagaatgcgcgccatcggcgtcgggctaccgcacggcatcgagatagttaaagtggctgaccagtcggcggtggtcagcggcgccgtaagcggatttgtccgggtactggtggaagccgtgctgattgtgctggcggtttcttttgtctcgctgggattaagggccgggctggtggtggccgcggcgatcccgctggtgctggcgatgacctttaccgggatgatgctggcaggcattggtctacagcgcatctctctcggggccctgatcgttgcgctagggctgctggtggatgatgccatgatcgccgtggaaaccatggtatcccggcttgaggccggcgatacgcgacggcaggcggcgacgtacgctttccaaaccatggcatttccgatgttgaccggtacgctggtcatgattgccggatttattcccgtcggttttgcctcatccagcgcgggcgaatactgcttttcgctgtttgccgtggtgctgatggcgcttctgaattcatgggtcgtggcgattctgttctcccctttgaccggaacgtggctgctgccggaaaagctgaaacatcgtgccgcaggcccgggccgcatggcgcggggatatggacgacttctgcgtacggtgctgcgccaccggcttgccaccctggggattgcgctggccgcgctggggctgtcggtgtacgggaccacgtttatgcagggggagtttttcccttcatctgatcgcccggagctgctggtcagcctgacgcttccggccaatgcttcgcagacggaaacggagaaacaaacggagaggctggaaagggcgctcgccgggaatcgcaacattgaccattattcgacctatattggggcgggcgccatccgcttttatctgccgatggatgttctgctggataatgaaaatacggcgcagctggtggtggtggcgaaagacctggccgcccgcgaccgcctgcgggaacagttaaacacgctgctgaccacgcaattcagcgatctgacttcgcgcgtttctcctctggagctagggcctccggtgggctggccgatcaaataccgggtcagcgggccggattatctcaaggtcagagagtatgccgggcgtctggccgaggcgatagggcgctcgccgttaacccgggaggtaaaccagaccgccggcgagccggagagaaccatcgtcctgcaggtgaaccagactgccgcgcgggcggcgggcgtgtcatcgcagagcctggcgcagacgcttaataccgtctggtcaggcacgacggtcacatcgctgagagacaatgaccggctggttgatgtggtgctgcgggcgaacgacagcgagcgattgaatcttgccaccctgtcatcgctgacggttgaagggcgcggtggagaaaaagttcccctcagcgcggtggccacgccgacctggggagtggacgatccggtgctctggcgtcggcaaagattgccgtttatcaccgtacaaaccgacctcgcgccggggatgcgggcagaaggcgtatcgaacggtctgcgcccgacggtggatcaactgcgcgcgggtttacccaccggttacagcattgtcgaaggcggggtggttgcggagtccgaaaaaggcaacagctcggtattgaatattttacccgtcaccctcggcattatgctgttattgctgatgcttcagctgcggcgctattcccgtatgctgctggctatgttcatggccccgttcggcttgccggggattgttttggctatgctgccgggcgacacgccaatgggatttgtggctctgctcggcgtcatcgcgctggcggggatgattatccgcaatgccgtgatacttatcactgaagtcgacggcaatctggcccagggcatggaaagcgatgctgctattattgccgccgcagagcaccgggccaggccgatattgctgaccgcctgcgccgcgatactgggtatggtccctatctctcaccaggtattctggggaccgatggcgtatgccatcattggcgggctgattgtcgcgacgctcgtcacgttaaccgtgctgccggcgtcctttagcctgctgctggagaggggaggataccgggaaaaacgtcccgccgcttaataacacaggatggccgggggcgaccccggtcggggtttccccccggggggtgctatatgcgaaaaaaaagcccgtacttgcgtacgagctcttcttaaaatatggcggtgagggggggattcgaacccccgatacgttgccgtatacacactttccaggcgtgctccttcagccactcggacacctcaccatattgttttgtcgctcaccttgggtgggcaacggggcgctactatagggagttgcgctaaaacggtcaagcagtatttatgctttcgctatcgttcggttaagcaatgaacactgccccgccgtagcacggcggggcagtcattttaacgctgtgaatcaagctgttcgttattcttcaccacgtcctgagctttggcgtagctctcaatcagcagctggtatgccgggaagaccttggtatacacctcggcccactcagcggcatccgggcgattccaggtgcgctgcagttcagaagcaaccgctgcggtatccatcggcacgacgccagcctggacgacgcgggcgagggtgatttcctgcgccatcttgctataggtaccggaagcatcaatgacggcaaaaaccttatagccatcggcgacggcggcaatggacgggaacgccatgcagacgctggtaatggtaccggcgataatcagcgttttacgcccggtcgcttttaccgcggcaacaaattccgggttatcccacgcgttaatctctcctttacgcgcaatatattgcgcatggggcgcgttcgcatgaatctcagggatcagcgggccgtttggtccctgcggcactgacgccgtggtgatcaccgggatcccggctaatgaagccatcttcgccagcgcggcggcgcgcgcccgcagctccggcatcggcatatcacccacggtctggaacagaccgctctggtggtcaatcagcagcatggcggtatcattgacatcaataaccggacgagaaccattaaagttagctggggtagacatattattcacctcattcaatatcaaatttggccgaagcggccgctattaaaatcacgaaccgcttccgcgatttgtgctttggtattcatcacaaaggggccgtagcccacgatcggctcctgcagcggttcaccggccatcagcagtacttttgcgttgctactggccgagaggtggagcgcttctcctttctggctgagcaccaccagctgaccctcgcgggcgctaccctcgccgttcaccaccacttcaccttccagaacgaccagcgccgtactccagccagcaggctgatgcagcgtgatttcctggctctggttaagctgcaggtcccagacgttaagcggagaaaacgtgtgcgcagggccgacaatatcttcgtagcgcccggcaataacccgcatatggcccgcattattcggcagctcaacgtcaggaatcacatcagcagtgatgctctggtatcccggctgcgtcattttgtctttcgccgggaggttgacccagagctgaatcattttcagctcgccgccggtacgggtaaattccgccgagtggaactcttcatgcaggatcccggcgcctgcggtcatccactgcacatcgcccggcccaatgacgccgcctctgccggtagagtcacgatgttcaacttcgccggaatagaccacggtgacggtttcaaatccgcgatgcggatgttcgccgacgccgcgtttgcctgtccccgccgggaagtgatgggggcctgcgtagtcgagcagcaggaaggggcttagctgttcgccgtgagtctggtaagagaacattgagcgaaccgggaaaccatcgcctacccagtgctgtgaaggcgcggtgtagatacctgtaatttgtttcatggcagtctcctgaatagctgtttctgatgtggataagcatagattcgccactaatagtccgctagatagcaaaaatgacctatactgttctaaaaatggaacgatgggggaaggatgcaggatctcaatgacttagcctggttcgtacaggtgatcgatcacggtggttttgccgcggcgggcagggcgctcgatcaacccaaatccaagttgagccgtcgtatcgcccagctagaagaacgcctcggcgtccgtttgattcaacggacaacccggcagtttgcggtaacggaagttggcctgaccttttatcagcactgcaaagcgatgctgatcgaggcggaagcggcagaacaggcggtggaaaccctgcgttccgagccgcgcgggagcgtaaagctgacctgcccggtaacgctattgcatgcgcatatcgggccgatgctggcacggtttatggtgcgctatccgggcgtgaatctgcagctggaagcgaccaaccgacgcgttgatgttgttggagagggcgtcgacgtcgcgattcgcgtacgtccaaggccgatagaagatagcgatctggtgatgcgtgttctggccgatcgcgggcaccgtctggtcgccagcccacggttggtggagcggcaggggcagcctcaggttccttcagcgctaagcgattggccggggttaagcctgggggcgggcaaacatcagcataagtggcagttgaccggcccggagggggcaagggcggaaatctactttactccccggctggtcaccacggatatgctggcgctccgtgaagcggccattgccggcgttggggtggtacagcttcctttattaatggtgcgcgatcagttggccgccggagagctggtggttgtcctcgatgagtggcaaccgcgcagggaggtgatccatgcggtgtttgcctctcgtcgcggattactcccctcggtcagggcgctggtggattttctcagcgaagagtatcagcggatggaagaggattagcatttgccacaatcccggcgctcggattaccggcaatctgcggcccggtagcccggctaagcgcagcgcaagccgggaagaagccacagcaataccgcgtcacggcatatttcccgggttgcggcgtaaacgccttacccgggctacgggctatcggcaatctgcggtactgtagcccgggcacgcgctgtgcgccgtccccgggagaagagcatggagtagcagaatttcccggaggcgatgctgcgcatctgtccgggctaccggacggagcgcagcaggcgaaaaaaaagcccatacttgcgtacgagcccttcttaaaacatggcggtgagggggggattgactcgctgcgctcgccgttactcggcccgtccctgggcctcgcccctgcggggccagcgcaggcgctgtgcaaaattgctcccggcaattttgtcggggcagattcctcgcaggctcgtcatctgtccaactggctgtcgccagttgtcgaaccccggtcggggcttctcatccccccggcggggtgctatatacgaaaaaaaagcccgtacttgcgtacgagctcttcttaaaatatggcggtgagggggggattcgaacccccgatacgttgccgtatacacactttccaggcgtgctccttcagccactcggacacctcaccatattgtctttcccgttgttgccgggaacgggcgctaatttagggaaatacgtatctcccgtcaatcaacttttttaaaaaatcgcgcgtttagccaaacttcaagcaacttgctccctaaatgggcgaaaatcgatttttttatcgccattccctttttcgcacgctcggcgaatgaaatttgctatgctggcaatctaatagaaaacaacgagtaaaacgcgacgctaacctaacctgccagcagcgtcggctatcaggagcctttatggatatcatcttttaccaccccacgttcgacatccctttttggattacggaactggaaaaacagctgcccggctcgcgcgtccgcgagtggaaacccggagatgatcaacccgctgactatgcgctggtctggcatccgccggtagaaatgctccagggccgccagcttaaagccgtctttgcccttggcgccggcgtcgattcaatcctcagcaaattgcgggaacacccggaaatgctgccgctgtcaactccgctgttccgtctggaagacaccggcatggggctgcagatgcaagaatacgcggtgagccaggtgttgcactggttccgtcgttttgatgactatcaggcattaaaacaagaggcgcggtggcagccgctggaggagtatcagcgtgaagatttcaccatcggcattatgggcgcgggcgtgcttggcgcgaaagtggccgaagccctgcaaagctggggttttccgttacgcatctggagccgcagccgcaaatcctggccgcaggtcaccagctttgccggagaagaggagctgaatgcgttcctcaacggaacacgagtgctgataaacctgctgcccaacacggcggaaaccgttggaattattaatagcgcgcgcctggcgcagctgccggataacagctacgtgctgaatctggctcgcggtgttcatgtggtggaagacgatcttctggacgcgctgaatagcggcaagttgaaaggcgcgatgctggatgtgtacagccgcgaaccgctgcctgaagcgagcccgctttggcggcatccgcgagtggcgatgacgccgcatgttgccgccgtcacccggcctctggaagccatggcttatatcgccaaaaccatcggtcagttagaacgaggtgaaacggtcagcgggcaggtcgatcgccagctgggatactaagcgacagccccgcatgagcggggtttttgctgatcacaggcgcagattcctgctattcttgccacaaacagagaaggagattgtgatgtatcctgttgacctgcacatgcataccgtcgccagcacccacgcctacagtaccctgcacgattatattgcagaagcaaagcgcaaggggatcaaactttttgccattaccgaccacgggcccgatatggccgatgcgcctcactactggcattttattaatatgcgtatctggccgcggctggtggagggcgttggtatcctgcgcggtatcgaagccaatatcaaaaatacccagggcgaaattgactgtaccggcccgatgctcaactcgctggacctgatcattgccggttttcacgagccggtgttccctccaaaggataaagcaacgcataccgaagcgatgatcgccacgatagcgagcggcgcggtgcatatcattagccatccgggtaatcctaagtttcccgttgatatcccggccattgccgcggcagcggcgaagcaccacgtggcgctggaaatcaataactcatcctttgtttcgtcgcgcattggcagcgaagataactgccgtgccgttgccgcggccgtacgcgatgccggcggctgggttgcgctgggctcggattcccatacggcattcacgcttggtgaatttagcgaatgtcgcaaaatcctcgatgctgttgattttccggaagagcgcattcttaacgtgacgccgcggcgtctgcttaattttcttgaatcgcgtgggatgcctgtgattcctgagtttgctgaactttaatttgaataactggaataaatgaatgaacgagttttcaatcctctgccgcgtgctgggctctctctattatcgtcagccgcaggacccgctgctggtgccgctgtttacccttattcgcgaagggaagctggcagcaagctggccgctggagcaggatgaactgctggagcgtctgcaaaaaagctgcgatatgccgtctctgtccgccgaatacaacgcgctgtttgtcggtgaagagtgccgcgtggcgccataccgtagcgcatgggtagaaggcgctacggaagctgacgttcgcgctttcctcagcgcgcatggtgtccccacgggggagggcgcggcggatcatttaggctccttgctgctggccgcttcgtggctggaagatcacgcgccggaagatgaaagcgacgttctggaaaccctgttcgctgagtatattctgccgtggtgcggcgagttcctgggcaaagttgaagcccatgcaaccacgccgttctggcgcgccatggccccgctgactcgtgaagccctctccgccatgtgggatgagctgcaggaagaaaatgagcaatgaattgtgattaaagtcacaatttaattgcaacaaagcattcttaatttcatttagtgtgttccgtgtcgcatttgacgggcgcgtttctgctatgatacgcgccatgaacatactcttcgcaatcgcattaacgacgggcattctctccggtatctggggatgggtggccgtcgcattgggtctgctgagctgggcaggtttcctcggctgtacggcttactttgcctgtccgcaaggtgggttaaaagggctgcttatttcgacctgtacggtcatgagcggcgtggtgtgggcgctggtgattattcacggtagcgcgctggcgccgcagctggaagtggttagctatatcatgaccggcgtcgtggcgtttttgatgtgtatccaggcgcgccagctgattctctcttttgtgccgggtacttttatcggcgcgtgtgcgacgtttgccgccggcggcgactggcgtttagttgtgccttcactcgcgctgggcctggtatttggctatgccatgaaaaatagcggcctgtggctggcgacccgggcggagaaaaataaatctctggctaatcaaagtcgcgaatctttttaacctatcccacttttttatcaccaaagagcccgtcgggctctttggctgtttttgctgccaagtattacctcatcataaatcttcccgccgttttgtttttccttatatatccgcaactttaactgtaccgggagttagtgaatcgattttgttagcacatttaaacaaatgatattttttgttttaaaattgttaatataattaaagtgaagtaaaaaaatataactcgtcgcactcatggatggctggtgctcttcagtagctataccgatatgcagaggagttttataatgaaaacaattagatatgcttcgcttgcagccctgtttatattaccctcgtttattagccctgcgatcgccgaacagaccgtggctggcgtcgtccatttttacggacgggtggtggaagcaccttgccagctcgatgcaatcaataatcaggttattatggattgcccgcgggcggagacgattaaaatttccgctcagcagcttgagaaagggaatatccgcaacgaaaatatccgttctgcgcaattacgctatattaatccgcaacggaccctcgccattctggatgttgattatcggtaaccctctgcccccgggctttcgccccgggggctatcgtgccatattatcctcctgtattcctttcaagacgtatgccgacaggaggagaaatggctgttcaacctgaagtggttctcggcgatattaccaggcttgaggtcgatgttatcgtcaacgcggctaatccgtcgctgcttggcggcggcggggtggacggggcgattcaccgcgcggcagggccggaactgctggctgcctgtaaagttgtgcggcaacagcagggagagtgtccgccgggtcatgcggtgattacggcggcaggaaatctgcccgccagcgcggtgattcacgccgtagggccggtctggcacggcggtgacaggcaggaggcggagttactggctgatgtttacaaaaatagcctgctgctggcctcggcaaataattaccgatccatcgcatttcctgctatcagcaccggcgtatatggttaccctaaacaggctgccgcggagatagccgtgcggacggtaactgcctttctcactcgctacaatccgctggagcgcgtttatttcgtttgttttgatagcgaaaccgccggcatctatacccaattactcgaggcgagtcgcgcgcaactcggccatcagaataagatatgatagtttcctgcgaaggcgggaaactatcataacgggagagtcatcggtgactgaagggaaggttctacaaaaacaacggcttcgccggatggaaattgttgccgcggcacaaaaatgtttcgcggaaaagggcctgcatggcgcctccgtagcggatattgcgcgtcaggctggccttagcgtaggccagctatatcgcgttttcgccagcaaagaagagatcatcgaagttatcgtcagcgagatcgtgaatgccagagtgggtgaaatggttgccgggaatcatgatttagcccgcatggcttcagttttagccggcgtgctccccgcgaccgagtctacgaaaaacgataattatctgctgatggaaattaacgccgaggcgtcccgaaatccgcgcctgcgtgaaattatgatccaggccgatcgtcgcctgaaagaggagggcggacggcttacccgccactatcatcctgagatgaccgcggagcaaattagcgtcgcctgcgaatttatcgcgatattaacggaaggggcggcataccgttgcgacctggcgacggccccgacggtagataaagcggcgatggagagcctgtaccgcgatgtctttcagctgttgtttgcgcaaaaatagcgctgctatgtgcgttccacacagcagctccctgttttaactggcggaaatttgcggcttagccgtcttttgctggaattttccggaaaaaagaaagcgcaacagcggtatccgcagatgaatttcatacagcaccagtgcaatcccgacaacaaaaaccagcccggtgataaatccaagggtatttgattgaatgaccggggttatccatgccccgtagagcagggtcagagggtggtgcaccaggtagataaatagcgatgcgttgacgaagtaggtcacccgcgcggactggaaattcaacaaacggtggccaagcgaaaagaccacgttgaccatccatagccccagcaccatcgtaatcatgtactccgtttcgtacatccagccatcgcccgagccgtactgctgattcagtcggtaggcgataaatcccagtaaagccgccacaaagcaccacggcgagggagtcgtgaacatcgtcttcagccgcgcgttaataaacgtctgggcgcccaggataaagaaaggcaggtagaacagcgtttgcatcacgataaagttgaacagaccgttgctgagaatgggcggatagagaataaaaatagtgcggcgaatgaccgcatacagcacgcccagagcgagaaaaatcatcgacagctggcctaatgtgacggtgtcaccaaaggtgggcgcagcggcagaacgcggtcgcgtcagccatttgaacatcaccacgcccagcgacgtcaggaccaccagcaccaacaaaaaccacagatgagagatcagctcccaggcgagggtgttgaacttgtcatagcctgacagcgtatgccagttatccgctttaccgttgacgtactgcagcataataaactgcggcagggtcaggagcgggatcgccgttaacatgggaatgccgacgcgctcaacgcgtactttccaccattttttcagcggatagcgcagaaaaagcatgtaggaaaaatagccggaaatcacaaagaagacctgcatgcgaaaggcatggatgaagtcgttaaataacgtcagccaccacgagggctcggcgctgttaacatgccagctgtggctggagtatatgagcgaaatgtgaaaagggatgcccaatagcatcagccaggcgcggatgctatcgaaaaaatattcacgctgtaccggagtattattcatacaatatcactacattctcagacaattcgtcttatcactcaacgtgataacgtttaaattctctgcaaccctacatgaactctggttaactgtctccaggataagcacgcaaagtgcaaacggggcagtaactgcgtattccctgtgccgcgatgccgaacaatgcagggattatgttgtcggaatgcctgagtttccattaaaatagatcggatcgatttaagcacacaaagggggaagtgcttacttatatgaaacataaaccacagatgatgaaaatgcgttggttaagcgcagccgtaatgttgtccctgtgtacttcatctgcatgggcattcagcattgatgacgtcgcaaaagaggcacaaacgttagccggcaaaggctttgaagcgcctaaaagtaacctgccctctgccttccgcgacatgaagtatgcggactatcagcaaattcagtttaatcacgacaaagcctattggaataatctgaaaagcccgttcaagctcgagttttatcaccagggaatgtatttcgatacgccggtcaccattaatgaagtgacggcaaccagcgtacgtaaaattaaatatagcccggactattttaattttggcaacgttcagcacgataaagacacggttaaagacctcggttttgcgggctttaaggttctgtatccgatcaacagcaaagacaagaacgatgagatcgtcagcatgctcggagccagctatttccgcgtgctcggtcagggccaggtatatgggctttctgcccgcggactggctatcgataccgcgctgccgtccggagaagagttcccgcgcttccgtgagttctggattgagcgccctaaagccaccgataaacgcctgacgatttatgcgctgcttgattccccgcgcgcaaccggcgcctatcgctttgtgatcatgcccggtcgcgataccgtggtggacgtgcagtctaaggtctatctgcgtgacaaagtcggtaaactgggcgtggcgccgttaaccagcatgttcctgttcgggccgcatcagccgtctccgaccaccaactaccgcccggcgctgcacgactccaacgggctgtccattcttgccggtaacggtgagtggatctggcgtccgctcaataacccgaaacacctggccgtcagcagctacgcaatggaaaacccgcaggggtttggcctgctgcagcgcggccgtcagttctctcgttttgaagacctcgacgaccgctacgacctgcgcccaagcgcgtggattacgccgaaaggtgattggggcaaagggaaaatcgaactggtcgagatcccgaccaacgatgaaaccaacgataacatcgtcacctactggacgccggatcagctgccggaacccggcaaagagatgaacttcaaatacaccatcactttcagccgtgacgaagacaaactgcatgcgccggataacgcttacgttatgcagacccgccgttctaccggcgacgtcaagcaatcgaacctgatccgccagcctgatggcaccattgcctttattgtcgatttcaccggcgccgagatgaaaaagctgcccgcagatacgccagtgactgcccaggccagcatcggcgataacgctgaaatcgtcgaaaataccgtgcgctacaacccagtaacgaaaggctggcgtatgatcctgcgcgtcaaagtgaaagatcctaagaaaaccacggatatgcgcgcagccctggtcaataccgaccagacgctgagcgaaacctggagctatcagctgcctgccaatgaataagataacgaagtacatcgacgcattgccgctgtcggatgcagaaaaacgcgcgttacctgacgcaagtctgcaggccgtacatcaagcactggacgctgaacatcacgtttaccaccgcgaagacgactccccgctggggtcggtaaaatcgcggctggagcacagctggccagattcactggccggtaaccagctggttaaggatgacgaagggcgcacccagctcaacgccatgccgaaagcaaaacgctcctccatgtttccggacccctggcggactaacccggtcgggcgcttctgggatcggctgcgcggacgcgacgtgacgccgcgctatctttctcgcctgagccaggaagagcaggagagcgagcagaaatggcgtaccgtcggctctatccgccgctacattcttctgctgctgacgctggcgcagaccgtggtggcgacgtggtatatgaaaaccattttgccctaccagggctgggcgctgattaacccggcggatatggtggggcagaacctgtggatctcctttatgcagctgctgccctatgtgctgcagtcggggatcctgatcctgttcgccgtgcttttttgctgggtctcagcgggattctggaccgcgctgatgggcttcctgcagctgctcatcgggcgtgataagtacagtatctcagcctcgaccgtcgggaatgagccgttgaacccggagcatcgcacggcgctgatcatgccgatctgcaacgaagacgttgaccgcgtattcgcgggcctgcgtgcgacctgggagtcggtaaaggccagcggcaacgctgagcactttgatgtctatatcctgagcgatagctataacccggatatctgcgtggcagagcaaaaggcgtggatggagctcattgccgaagtgcagggcgaagggcagatcttctatcgccgccgccgccgccgcgtgaagcgcaaaagcggtaacattgatgacttctgccgccgttggggtagccagtatagctacatggtggtgctggatgccgactccgtcatgagcggtgagtgcctgagcggcctggtgcgcctgatggaagcgaacccgaatgccggtatcatccagtcatcgcctcgcgcgtcgggcatggatacgctgtatgctcgctgtcagcaatttgccacccgcgtctacggcccgctgtttaccgccgggctgcacttctggcagctgggcgaatcgcactactggggacacaacgccattatccgggtgaaaccgtttattgagcactgtgccctcgcgccgctgccgggtgagggtaacttcgcgggttccattctgtcgcacgacttcgtcgaagccgcattgatgcgtcgcgccggatggggggtctggattgcttacgatctccccggatcttatgaagagctgccgccgaacctgctggacgagctgaagcgcgatcgccgctggtgtcaggggaacctgatgaacttccgcctgttcctggttaaagggatgcacccggttcaccgcgcggtgttcctgaccggcgtgatgtcatacctgtcggcgccgctgtggtttatgttccttgcgctctcaactgccctgcaggtggtgcatgcgttgaccgaaccgcagtactttctgcagccgcggcagctgttcccggtctggccgcagtggcgtccggagctggccattgccctgtttgcttccaccatggtgctgctgtttctgccgaagctgctgagtattatcctggtgtggtgtaaagggccaaaagagtacggcggatttatccgcgtgaccctttctctgctgctggaggtgctcttttcggtgctgctggcgccggtgcgtatgctgttccataccgtatttgtggtcagcgcgttcctcggctgggaagtggtgtggaactcgccgcagcgtgatgacgactctaccccgtggggcgaagcgtttatgcgtcacggctcgcagatgctgttgggtctggtctgggcggtgggcatggcatggctggatctgcgcttcctgttctggctggcgccgattgtggtgtcgctgattctgtcgccgttcgtgtcggccatttccagccgcgccaccatcggcctgcgcactaaacgctggaagctgttcctgatcccggaagagtactccccgccgcaggtgcttaaagatactgacgcttacctgacgctcaaccgtcagcgttcgctggacgacggctttatgcatgcggtatttaacccgtcgtttaacgcgctggcaacggcgatggccaccgcgcgccaccgtcacgggcatattctggatatcgctcgcgaacgtcacgttgagcaggcgttgaatgagacgccggataaactaaaccgcgatcgtcgtctggtattgctgagcgacccggtcacgatgtcacgcttgcactatcgcgtgtgggccgcgccggagaaatactcttcgtgggtcggcgcctatcagcagctgacgttgaatccgctggcgttaaaaacgaagtaagccgtacgttaaggaaaataccggcaatggcgccggtatttttttacctgaaaatcgaggttgttgatgagagttttactggttatcgcaatgacgctgtttctcagcggctgcgggagtattatcagccgcacagtgccaggccagggccatggaaaccagtactatcccggcgttcagtgggatgttcgtgattcagcatggcgctatatcactattctcgatctgcccttttcgctggtgtttgatacgctactgctgccgcttgacgccagccatggtccctataactaattagcgttcatcccattcatcggcggcagcctggccctcctcggtatcgagagagggttcaagctgaaactcgccttcatcccattcgtgcagcgtgttttcttccagccactcctggcgaagctcaatctcatcataatcaccgtcaaagacgctctgcgcagcctgaccgctgaggaccggcagacattcgccctgttcatcctcgtcggcgaaaaattcggcctgccaggcaatatcaccgtcctggagtacgtacttctggatatttaactgctcaatgctggcgctctcttcgtcgctatcgggattattagccagaaactcctcgcgggctgcatcgattgcttcttcaagcgtggcatagaacatcgaatcctttggcatggctaacctcctaagatgaatagaaatgaacacgattcaatctatagaaggcggttggcaatgcgtcaaggaggtgaacgccacacggacattaatttaccgaatgcgtgccggaacccggattgtccgttgcccgggggcggcgggagcgaccgagggtcagggttgagtagaccgcattgaacagcaccacaccggcggtgactaaaaagactgcccggaagccgtagttggcggaaaccgatgcgccgatgagcgggcccgtgacgttgccgatatcgcggaacgactggttatagctgaatattctgcccgagatttggctggtggagttgtacaccagcagcgtttgcactgccggcagcagcgcgccgtcggcggcacctaacaggaagcgcaggatacccagctgcagcggcgtctggacgaacgacatgggaatcaggagcaggacagaaatcaccagcgcgacgatcaggattttttccggaccgatacggtcgccgagtttaccgaggcgaggggcgctaagcagggcggcaataccggggactgaagctatcatgccgctgataaacgcaatattactgacgttgccggcgagatcgcgcacgtaaagcgtcaaaatcggcgcgatggaaccggtagccacctggataatcagcgatgtcacaaacagactcagcaccagtttcggatttttaagcgacgtgaaaacgtctttcgcgctgagcatctcttttttactgacggcgacaaagttctcgcggatgagaaaaagggtaaataagaaacaaataaacagcacgcctgccgtcataaagaagacggtacgcaatccccagtgatcggccaggaaaccaccggccagcggccccagcagcgcgccgctgaccgccccggtagagagggtccccagcgcccagccgctcttatgacggggaatttgcgtcgctatcagcgcattggcgttaggaataaatccgccgagcagacctaacagcgcgcgcaggatcagaaactgccagatattctgcgccaggcccatcagcagcataacgattgccataccgagggccgagcgcagcagcataattttgcgtcctttgcggtccgcgagaccgccccagaagggggaggccacggcggaaaataaaaaggtaatgctgaaaaccagccctgaccacatattgagggcgctatggccggttacgccgagttgttcgacgtagagagggaggaacggcatcaccaggctaaaggcggcgccggttaaaaagcagccgagccaggtgacggtgagattacgtttccagttaatgggggtatcagcagagggcataggtttccactgacctgccgcgcaggtcaaataattgaaaatatgagcctgctaattatgcgcctgagaaatggttgccgcaatggaggagagcttttaaagctaaaggagggctctgaacggcggggcttaccccgcatccggattcagatgcggggtcattgcgcgagcgcgcgccgggaggcgctagtaacgagaaggaacgccttcaggacgcgttttaaagcggcgatgcatccacatatactgttccggcgccatcaatatgcacttctctaccactttgttcatccagacggcggtagtctccgcatcgtccagcggcggatcgcactccggcggcaggataatcagctcatagcctttaccgtccggtttacggcgcggcacgaacggcacaacgcaggctttagacatctttgccagcatccaggtgcccgaggtggtcgcggcctggtcaacggcgaaaaacggcacaaatacgctggcggccgggccatagtcgtgatccggcgcataccagatcacttcaccctttttcagcgcgcggatcatgcctttcagatctttacgatcgatcatgtctttgttggagcgcaggcgtccccatgtctgcagccagtcgataaccgggttatcgtttggacgataaacgccaatgcccggctcgttgataccgaacatgcgcgcgcccatctccagcgtgaggaaatgaatgccaatcagcaaaatgccgcgcttttgcgcctgaacatcacggatatgctcgacgccgatggagtcagtccagcgcgcaatacgcttcgtcggccagaaccaggccatgccggtttccattaaccccatgccgacggattcaaagtttgccacgaccatgcggtgacgctcttgctcgctcttatcgggaaaacagagctccagattccggttggctattttggcccggcgcttcattagccgcatggcgaggcggccaagaccggttccgaggcgataaatcagcggataaggcagctgaacaaccaaccagagcaggccgatcccgagccaaagcaaccagtaacgcgggtgcagcaacgctgcggaaaatttaggtaaatgggtcatctcatacctgtttaattaagcaacgtgttctattatcgcatttttttatgcctcagccaaaataccggccgcagatggcatttaatgttaacgcaagcaaatatgggtgagaaaaatgtagcgcaaaatgtggggatgtaaattaagcgtgtttgctatatgatgcccgccgtttattttactcattgactatgccgagcaggtacaccatgccagtgttacataaccgcatttcaaatgagacgttaaaggcgcaaatgttggctgagaccgagccgcgcacgacgatctcgttttataaatatttcactattatcgacccaaaagccacgcgcgatgcgctgtggattgcgttgactaagctgaacgtctttggccgaatttatctggctcacgaaggtattaacgcgcaaattagcgttccgcaaagccgggtcgatgcgctgcgcgaattcttatacgcttttgatcctgccctgaatggtctgcgcctgaatatcgccctcgatgatgacggtaaatccttctgggttctgcgtctcaaggtacgcgatcggatcgtcgcggatgggattgacgatccgacgtttgatgcatcggacgtgggcgattatttaaaggctgcggaagtcaacgcgatgctggacgacccggatgcggtctttattgatatgcgtaaccattacgaatatgaggtcggccatttcgagaatgcgctggagatcccggcggatacgtttcgcgaccagctgccgaaggccgttgagatgatgcaggaacataaagataaaaatatcgtgatgtactgcaccggcggtatccgctgcgaaaaagccagcgcgtggatgaagcacaatgggttcactaaggtctcgcatattgagggcgggattatcgaatacgcgcgacgcgcacgcgaacaggggctgccggttcgctttgtcggtaagaactttgtcttcgatgagcgtatgggagagcgtatctcagatgatgttatcgcccattgccatcagtgcggcgccccctgcgacagccataccaactgcctgaacgatggttgccacctgctgtttattcagtgtcctgcctgcgcggagaaattcgccggctgctgtagcgaagcctgcatggaagagcataagctgccggaagaggagcagcgaaaactgcgcgccggccgcgagaatggcaataagatctttaataaatctcgcggtcggttgaatacgaagctggggatcccggatcctgagccttcagaaaaaccatagccagataagatcgataaacgccagcagaagccacagcgccagataaatcataaaatgttcgcggacgttgttaaccagtaattcgaacaggcgacgcatcatctctctcatcattcacggcctcaagcgaggccgtttctttagcgtggttgtcaggttgtacggcgggcgcttatttcttaaaccgcgccagtgaaaacggggatagatcaaacccaaagggttcttcaagcgcaaaccgtgtggccagttcaccgagtaccggtgcgaacttaaagccgtgcccgctcaggccggtaatcaatagcgtatccggctggccgggcagcgtatcaatgataaagtcctcgtcggcggtgttgtcataggtacaggatgcgccatgcaggcagccgccgataccgggcaacacattacgcaagaagctaaaagcttcagagccgtccgttgcaacggcaccaaacggcttacgctcttccggcgtggaaataggctgcccgccgttatgcttgccgattttcaattcgttatcttctgccgggaaaccgtaaaactgatcgccattcgctaactcaccggtaaacgccgggaaattatttttgctgctgtagcggccatccgcctgaaaccaggcgaaaattttacgtaccggctggacagggagttctggcatcagccgggtaacccaggtaccggcgctaaccagcagttttttgccgctgtactcaccatcaatcgtctcgacggttacgccgttcggcgcgtggtgaatggccgataccgggcagttgaagagctgtgcggcgcccgcttcgcgtgccagacggatccagctttcaacggccagttcgctgcgcagtatgccggatgcgggttcaaatattgcccgataatcatcaggaatacgaatttccggccagcgagtcatcaccgtctgcgcatccatttcttcgatattgagctggaactcgcgcgcgctgctggcaacattgcgcagaaagtcggaaccggcaggcccgaggttaatcactcctgtacgttcaaagacggcttcaccgctggcggcggcaaactcatcccatagctgttgcgcgcgcagtaccagggggacatatctttcgccttcgccgtaggcgtgacgaatgaggcgggtgctgccgtgatggctgccttcctgatgcggcggctgatgggcatcaatcatcagtacgttgagccctgcctgccgcgcataatagcctgcggcagcgccgaccgagccgctaccgataatgataagatcgtattgcatggtgagttccaggttattgctttattagcagggtaattaacaacctgctgttatacaagcccgaaaataattcaggcacccgagggtgcctgttaagtgaatattctgacattagcgctaaattttaatgccttcgatactcattttcctggtattcgccagattcaatcttcgcaatacctgcttccagaatcgaaataaactgacgtgcgacgtccgtcgttagccatagcgtctggccaatctctgcgtctctactgctttcttgagcggggttttggtagtgcaggcgcaacatcagcgcatcgtaactatcaacggtgctgatgtcccatccgacgaggggatgggtctggatgacttcattattcttttccatcataaccccttattcatatgttaaaagacaacagttctcgaggtttaatgcgtgttttttgaagcaagttaattatatcagtagtcaagaataaactcgagaaattaaatgaaatagagacacatacgcgcccatgtgctgattttttaggcaaatcagggagggttatttgttatttatgaaggtgctaaggaaaagcaataggggagagtctgactatgaaaaaaataaaaaagccggggcgacccggcaaaaaattgcacaatgagggagcaaatttaattgactagtcgcggacaaaccagtcgtcagcgctttcccaggtttcttgcaggatttcgctaatccggtctttgtcttctttcaggccgccgataaccgacagattgttattagccgcgtaccgaaccgttacctgacttgaggtagagggaaactgctgttcgatacgacgcgagagttcattgttcagcgcatctaaggcgccgttgggtaaggctgttgatttggcgatagagacttcaatacgcataattgccccctggataatgtactgtttatttatacagtacactctgaagatttacaacagggggcaggctatttattttttcatcgtccagcgcacggtttccccggcaaggaacggcaccagcgcgtcgcctggcagggcgatactctcgaccacctggctctcttcgcgcaccagctccacgtagccctcattgaccggcaggccatagaagcgggggccgttaagcgaacagaaggcttcaaagtgttgcagggcgttcatctcctcaaataccgtggcgtagctgcccagcgcggtcggcgcgttaaaacagcctgcgcatccgcagctggcttccttacgatggcgggcatggggagcggaatccgtgccgaggaaagcgcggtcaaaaccgctggcaaccagttcgcgcagcgcctgctggtgaatattgcgtttcaggatcggcaggcaataaaggtggggacgcacgccgccaaccagcatatggttgcgattgaacatcaggtgctgcggagtgatggtggccgccagcagctcgttaccgtcgcgtacgtattcagcggcatctttggtcgtgatgtgttcgaagaccaccttcaggcctggcaggcgctgacgcagcggctccatgaccgtttcaataaagcgcgcttcccggtcaaaaatatcgatatcagcatgggtgacctcaccgtgaaccagcagaggcatccccagcttttccatgcgttccagcaccggcataatggcatccgtactggtgacgccgtggctggagttggttgtagcgttggccggatagagcttggcggcagtgaatacgccttcgttaaatccgcgctccagctcagccgggtcgagcgtatccgtcagatagcaggtcatcagcggcgtaaaatcatggcccgcagggatcgcatcaacgatacgctggcgatagtcgagggcagcttcgacggtagtgacaggcggtaccaggtttggcatcacgattgcccggccataaaattcactggtataaggcacgacgatttttaacatatcgtcatcgcgcagatggatatgccagtcatcagggcggcggattttcaatacctgggattgtgctgtcatggaaggctccggctaataggttcagtcatcagggctgtttttgccgggcactaaggataagcgtaaacgttttcctttgcatcaacttccgtaaaaaatcgggcgcttcagcgcccgagccatcagttggtgaacgggataataatctcgccgggcttcacttcaatccctttagcatactttttcgccagcgcttcaccggtgctggcatcctcgcgcaggacgtaggcaggctgctgattgaagtagctacgcagggactgattcaggtaagggatcagcgtctgtacgacagactggagcttttccggctgaactttagcatcgacgacttccatctcctgcaggaaaatggcccccttttctttattgaaagccggcagcgctttgagcttcagatcgatggtcgctttctggttcccgaaaagtgaattcagatctaaattggccacgccgcttaacgtgactttgtttggttcttcacggccaatagcgctggtaagattttgcagttcaatatgggcatccgctacgcctggcaggccaatatccttagcgaagtggttacgtttctgcagcgcctgattgatttcctgctcgctcacggaatattgcgtgagctgattacaggcgctaagcaggccgctaacgataagcgcggccgcgataaacatctttttcattggattccttaatgtcatgccatgggttcatcctgacacaaagcagcatggcccgccagcgcaggaggtgctagcggaaaagactgaaaaagaggcgttcggcagcgaagggctaaaccatccgctgccttgaggctaaatagccattgaggaaagcaggttgatctgcgtctgtttggccatgttgtcacgataggcggccacccgactcggccagttcacgccggcaaccagcgtcagattcctcagcagaggaaagagctgaatatcatcttcagagagttctccgttgacggcgttcggctggacaatcagtttatccagcgcccgcagatcgtcgctgatgttcttcaccagaccggaggaatgggcgagatggtcggcaaagctgccgatagccgcctctttctttttcacaaaataggcgcgcgcctctggcgtggcgaattcatcaaacgcggatttggcaaagcgggggatcagcaggcggttcgcgtagccgttgaccttccgcagccaggtttccaccgccggattacgcgggccggtaagcagcggtttgccgtccagcttatcgacatagtgcacgatatccatgctttccggcatatagcggctatcgtctttttgcaggattggcgccattttctggccgatcattcgggtgggggttaattcatcatcgttcaggagcacaatcagttcgacggggatatttttcaggccgaaaatcatgcgggctttaaggcagaacgggcagtgatcgtagatatataacttcacgtttctcctccattgttgctgaacatcctcaattcagtatggaggagaaacgaaggcccggcaaatcaggttcgcggctccagcattccggaggccgaacgttttggactgaactgccaccacagcgcaataaacgtcgcgaggccgataatgcccagcatcagccacggcagttcaggctgaccgacggccttaccggcatcgaacagccagccgccgcctgcgtagccgaaagcgccgccgaaggccaggcctaaccggctaaagcccatatagctgccgcgcgctctggcatccgccagcgacgcccccagcgtttcacgcgcgggttcagcgatgattgaccccatataaaatacgcagatcagcgtaaacagctgctgcaaattgctgctcaggccaattggcatcatcgcgagcgtcatgatcagcaggccggccatcaggcgctgctccaggcgaaaacgcttttcgctccagcgggcaatcggatacagcagcgttagcgaaatggtcgcttcaatggcgtacatccatttgaccgccgccggagaacccgcaatatcattaaccataatcggcagcatcagcatcacctgcaccgccagcatgtaatacccggtcagcgtcagcacataggtgacaaagcgtttgtcgcgcagcacgcgccccagtccttcacgaaccggcgttttgaccgtcgacagcttccatgcgggaagataccaggcgttgaatgccgcacaggcgataaacagcgccgccccggcgctgcacaccaggcgaaaatcatattgcagcagccagctgcccagcagcgcgccgatcaccgctcctgcgctgtcctgcatcatcaggatagagaagaaacgtccgcgctggtgcgggcgtaccagcttgaccaccagcgccgcccgcgggggatcgaacagcgtgccgccgaggcctgaaagaatacaggagagccacagcacccagggttcatgagcgacggccatcgccgcgaagccggccgcgcgcatcagcataccggtaacgatcatcggcttggcgccaaaacggtcggcaatggcgccgccaaatattcctaagccttgctgcaccagctgacgcaggccgagcgcaatcccgaccatcagcgcagcccatcccatctggtcgacaaagcgaatggagataagcgggaacacaacgaaaaagccgagtacgaccagcatgttatcgactaacaggaaatatttacccaggctccttgcctgcgatacgcgggacatttcccctccagggaaaaataagaataagctctgacattttgcggggttaatggctattttcccagcgcgctcgcgacaatatttttttatcaaaatgcaagaacgatagaggctattcatcgaaaagcagagatggtgcagaaaatggtatgttgctgttttcacaccgccgtgcaggacaggtatagtaaagtcagcaagtattgcgtcaggggaacaggagaggggaatgtttggctatcgcagtaacgtaccgaaggtgcgtttgacgacggaccggctggtggttcggctggtgcacgatcgtgacgcctggcgtctggccgattattacgcggaaaataaagggttcttaaaaccctgggaaccggtgcgcgatgacagccactgttatccttccggctggcaggcgcgtttatcgatgatttctgagtttcataagcagggctcggcgttctattttgctctgcttgacccggaagaaaaagagatcatcggcgtggcgaatttttcgaacgtggtgcgcggatcgtttcatgcctgctatctcggctactccatcggggagaaatggcaagggcaggggctgatgtatgaagcgctgacgtcggccattcgctatatgcagcgcacgcaacatatccatcgcataatggcaaactatatgccgcataatcagcgcagcggcgatttgctggcgcgtctgggctttgaaaaagagggttacgccaaagattacctgctcattgatgggcagtggcgcgatcacgtactgacggcgttgacgacaccggactggaccccgggtcgctaaggagacatcatgaaatatcagttaaccgcgcatgaggcgcgggtcattggctgcctgctggaaaagcaggtcaccacgccggagcagtaccccctgtcggtcaacgcggtggtcaccgcctgtaaccagaaaacaaaccgtgaaccggtaatgtcgctcagcgaaagtgaagttcaggatctgctcgatacgctagtcaagcgccattatttgcgtacggtcagcggtttcggcaatcgggtgaccaagtatgaacaacgcttctgcaactctgaattcggcgatctgaaattcacgccggcggaagtcgctatcgtgaccacactgctgctgcgcggggcgcagacgcctggcgaactccgcggtcgcgcgcagcgaatgcatgaattcagcgatatggccgaggttgaaagcgtcctcgaaaacctggcttcgcgagaagatggcccctacgttgcgcgtctgccgcgggagcctggcaagcgtgaaagccgctatatgcatctgttctgcgatgatatggattcactgattaccgtcgtggaggccgtgtcgccgcccggcgacgatcttcagatgcgcgttgaggcgctggaggcggaagttgccgagctgaaagcgcgtctcgattcactgctggctcacctgggagattaagcatgtcggcgaaactacgtataggagtggttggcctgggcggtatcgcgcaaaaggcgtggttaccggtgctgggggccgccgatgactggacgctacaggcggcgtggtcgcccgggaaagagaaagcgctgcgtatctgtgaaacctggcgtattccctatgcggattctctggaacagctggcggcgcagtgtgatgccgtattcgtgcatacttcaacggcttcacattatgaagtggtttcccgcctgctcaatgccggagtgcatgtctgcgttgataaaccgctggcggataaactcagcgatgcggaggcgctggttgagctggccgctcgccgtcatctcacgctaatggtcgggtttaaccgccgttttgcccccctctatcgcgagctgaaggcccagctcgggagcgctgcgtcgctgcggatggataagcaccgtagcgacagcgtgggccacgatctgcgcttcacgctgttggatgactatctgcacgtcgtcgataccgcgctatggctggcgggcgataaagcgcgtttaaacggcggtacgctgcacaccaccgctcaaggggagatgctgtatgccgaacaccatttcagttgcggaatgatgcagataaccaccagtatgcaccgccgcgccggaagccagcgggagtgggtacaggcggtgaccgacggcggattatatgaagtccgggatatgcgggagtggcaggaggagcggggacgcggcgtgatccagcgcccgatccctggctggcagaccacccttgagcagcgtggatttaccggctgcgcgcggcattttatcgaatgcgtgcaaaatcagacggttcctgaaacgtccggcgagcaggcgctgcttgctcagcgcgttatagagaaactgtggcgcgaagcgatgagcgaataatccgttgtaacaactgacagtagtaattcattatgaacccggtagactatcgccactttccagcgcccgcatttgcgggcgttttactccagggttgtggaataacacgttaatgaatcttttaaaatcactggcggccgtcagttcgatgaccatgttttcgcgcgtgctgggctttgcgcgcgatgcgattgtggcgcgtatttttggcgcggggatggccaccgacgccttcttcgttgcttttaaactcccgaaccttttacggcgtatttttgctgaaggcgctttctcacaggcttttgtgccgattctggcggagtataaaagcaagcagggtgaagatgcgacccgggttttcgtcgcctatgtttcggggctgctgacgctggtgctggcgctggtcaccgtcgccggtatgctggcggcaccgtgggtgattactatcaccgcgccgggatttgccaatacgcccgaaaagttcgccctgaccacgcagcttttgcgcatcacttttccctatattctgttgatctccctggcttcactcgtgggcgccatcctgaatacctggaaccgcttttcggtgcctgcttttgccccgaccttcctgaacgtcagcatgattggttttgcgctgtttgccgcgccctattttaatccgccgatgctggcaatggcgtgggcggtaacggttggcggtattttgcagctcgcctggcagctgccgcatctgaaaaaaatcggcatgctggtgctgccgcgggtcaaccttaaagatgctggcgcagtgcgggtggtaaaacagatgggcccggcgattctcggcgtctccgtcagccaaatctcgctgatcattaacacgatttttgcctcattcctcgtttccggctccgtatcgtggatgtactacgccgatcgtctgatggagtttccgtccggcgtactgggcgtggcgctggggaccattttgctgccttcgctgtctaaaagcttcgccagcggcaatcacgatgaatattgccgtttgatggactggggattacgcctgtgcttcctgctcgcgctaccgagcgcggtggcgttagggatcctggccaagccgctgacggtcgcgttattccagtacgggaaatttaccgcttttgatgccgcgatgacccagcgcgcgctggtggcatattctgtcgggctgatggggctcatcatcgtgaaggtgctggctcccggattctattcgcggcaggacattaaaacgccggtgaaaattgccatcgtcacgctgatcatgacgcaggtgatgaacctcgcctttattggccccctgaagcacgctggtctgtcgttgtcgattggtctggcggcctgcctgaacgccgcgctgctctactggcagctgcggaaacagaaaatttttacgcctcagccgggctggttcctgttcctgctgcgcctggtcatcgcggtgattattatgtcagcggcgctgctgggcgtgatgtacctgatgccggagtggtcgcaggggacgatgccgttccgcctgctgcgcttgatggttgtcgtggtggccggcgttgtcgcctatttcgcgacgctgctgctgctgggctttcgcgtgaaagagtttgctcgccgcacggtttgagttgttctgatgaaagaaaagccgctctgcaggaattgcacagcggctttttttacctgacggttcgctctttatctggcggttcgctgcgccgatacgaccctggcgctttccagcaggcggatcccaagggcaatcgcaccggttacgacggcgagggtcaccacgccgctccagcctgcgagcacatacagtttgcttcccagtactgaacccagcgacatcccaataaacacgccggtgaacagcagcgcgttgaggcgtccgcgcgcctgcggctccaggccatacaccaggttctggtgcgctacgaggctggattgcagccccaggtcaaaaccgacggccgagatggcaatcaggattagctgaccatgtggcggtagcgcaggcagcaaaaacatcagggcaaacgaaaccgtcaccagcgccgcgcccatttgcgtgactttttctgcgccgaacttgtcggccaggccgccggccagcggggcggcaagcgccccggcagcccctgcaataccgaagccaccggctaccgcgctgcccatctgatagtgcgccaacagcatgaccgcaagcgtagaccagaaggcactaaaggcgatagagaggaatccctgggcgaatgcggcgcgacgcagtgccggatagcgtttccacagatgcgccatcgatttcatcagctgcgggtagctgagggttgagtgaatttcgaagcgcggcagcacgcgccacatcaccacgccaatcatcgcaatgctgaccgcagccgcctgatacattacccgccagccgaatagcgcccccaccagaccactaacggttcgcgacagcaggatccccagcagcaggccggtcatcaccgtacccaccattttcccctgcttgcccgcgggagccagaatcgcggctgccggtacgatatcctgcgccatggtcgcggccataccgataagcaggctgacaatcagcagggagcttagctgaccggtaaggctgcagagcagcaacaggacggccagcgcggcgcttttcatcaggatcagctttctgcggtcgtggcggtcgccaagcgggagaaggaaaagtatgcccagcgcgtagccggcctgggtcagggtcggaaccagacccataccctcaacgctcaaatggaggttagcccccatcagcggcagcagcggttgcgcgtaatagattgaggcgacgctgaagcccgcgcccagcgcaaggatgaaaatgacccacccggcggcgcgggaggtgagtggagttggtgtcatggtggattcctcttagaagcgatggcgctatttttcccgtaatccggctggcgcggtagatagcccggtggtaaaacggttatacgctaaacgtataggcaaaatataaatgaagaagcaagagcgtatagatcgtatcgaactgatgcgtacgttcattcgtatcgtggaggccggctctctctccgccgccgcggtacagatgaatacgacccaggcgacggtaagtcgacggcttcagtctctggaggggctgcttggcgcaaagctgattctgcgcacgacccacgcgatgaagctgaccgatgacggtgagcgctgttatcagcatgcccgccaggtcgtcgatgcctggctggcgctggaggacgacctgcggatcaccgatgaccggccggtggggattttaagggtgcgggccccgcatgcgtttggtcagcaacagctgctggggccgctggtggattttttgcagcgctatccccagctggcggttgaatggatgctgaacgataagacggtcgattttctgagcgatggtatcgactgcgcgattcgcgtgggggctgaggtggatccggctacggtatcggtactgctggccgaggttccccgcagcgtggtggcatccccatcgctgctggcgaacttgccgccgttaagcgcgccgcaggagatgtcgttgctgccgtggatagccatcagcacgttctatcagcatgaggtgaggctgcagtcgcaggtggatgagcagcttattacctttgccatcgcgccgtgtctgagtaccgatagcgtgcatgtggcgcgtaataccgcgctggcggggctgggcgcggcgattgtgtcgagctgggcggtagcggacgatattgccgccgggcggctggtggagctgttcccgcagtggcgagcctcaccgctgccggtacacctggtgtatccctgggcgcgctactatccgacgcggttgcgtaagtttctcgatctgatgcgtgaggtcatgccgcagattgcggggatgcagcgtccggaaggggaataaaaaaagaccggcgcgggggccggtcttgtcgaggtgacgttactctacgggctgcggacgggtaggtccggcagcggctttgtgcgtggcgctatgaccgccagcagaacctttaccgtcaaaatcaaagttcgggcgaacccactcgctttgacgaggcgcttcaggtacgtagtctggcgctggggcgcgggtcatcggcgccgtggcgtgacgattggcgaccttaacgaccggcgcagccgtgacaacaggttgagtcgcaacgaccggctccgcctctggtgcaggttcaaccaccggttcggaaacaacaggcgcttcctcaacaaccaccgccgtctcttcaaccgcaacaggttcagcgaccgcagcttccggttcgacagcttcttgcgcaacgacgtcaacggcttctgcgacaacttcttcggccacggcttcatcggcttcggcaatcagctgcggctgttcatcaaccggggcggcgatagcctccggatgcgtggtttctacgaccggaacttcaggttcgctaatcaccgccacaggctcggaagtggccactggctcgactgcgctttctgcggcgacagccggggcaatcacttcagagacaaccggctcagcggcagccactggcgcgacgacgggctcagccgcagtggttgagaactcctgaacctgcacgtcttcctgctgctggtcctgagggcgaacgaccgggtagcggatccacactttaccagacgccatttccggcgatgcgcaggctacggtcagcggcatcggggattgcgtcgggtaacgctcatcacggtagcgacgacggcgctggccgctgacgcgcaggtgacgaggggaacgacgtgaacgacgcggcataccgttagattcgcgggcttcaccgttctcatcatgttccgcagtggtttcaacaaccgccggcaggtcgactttcgccagttcagtgcgcggcgctgcggcttccggctggacgaccggcgcttcggcgacctgaggcgcggctaccggctcgacaacctgttcagcggcagcagattcaatacgcaccttctgcgccagctggcgaggtttacgacgcggcatcgtctgcacgcgctcttcctgctcgctctcctgaacaaccggctcttcgcgggtttgcgctttggcttcctgctgaacctgacgtttatcatcgttacgacggcgattacgttcgcggcgcggctgctgctcgtcgcgcgctttgcctttttcgctatcttcgaccgttgtctggcggatttcgcgcggctcagcgttctgctgctgcttctcacgacggttgcggcggttttcttcacgagactcgcggccttcgctgttctcggcacgactatcgcggttctcgcggctatcgcgattatcccggttgtcgcggcggtcattgcgatcgcggcggttgttggaacgcggtttacgacgctcctgctgacgctcggatttctcttccgcttttttctcaacctgaacttccgccggtttagtctcttcctcgctggagaacacttttttcagcgcgctgaagaagcgggcaaccaggccaggctgcgccggcgctgccgccttcggtgcggatgcggcaggcgcaacggtagccgcggctctggccggctcttcctgggccggagccggaggcgcgtcaggcatgacaaaagcagccagcgccggttgttccgggagtttacgctcggccggctcttcatcagaaggcatggccatctcttcttcgtgcagtttcggcagcagatagctcagcgtggaggtctcttcgcctttacgcacgcgcagaacagagtagtgcggcgtttccatctggtcgtttggcacgataataacgcgcacatcggcctgacgggtttcaatcgcgcttaccgcggcacgtttttcgttcagcaggtaagaggcaatcggcaccggtacgatagcgtgaacttctttggtgttctctttcagcgcttcttcttcgatcaaacgcagaatagaaagcgacagcgattcgttatcgcgcacggtacccgttccgctacagcgcgggcagacgtgatggctggactccccgagcgacgggctcaggcgctgacgcgacatctccagcagtccaaagcgggaaatatggctgatctggatgcgcgctctgtcctgacggacggcttcgcgcaggcggttttctaccgcacgctggtggcgaaccggggtcatatcgatgaagtcgataacgatcaggccgccaaggtcgcgcagacgcagctgacgagcgatttcatcggctgcttcaaggttggtattaaacgccgtttcttcgatgtcgccgccgcgggtggcgcgtgcggagttgatatcgatagcggtcagcgcttcggtgctgtcgataacgatagaaccgccggaaggcagacgcacttcacgctggaaagcggactcaatctgcgattcgatttgatagtggctgaacagcgggatttccccggtgtacagtttgattttgctgctgaaatccggacgacccagcgccgcaatgtgctggcgagccagctcaagcaccttcgggttgtcgataaggatttcgccgatatcctgacgcagatagtcgcggaaagcgcgcacgatgacgttgctttcctgatggatcaggaacggagcagggcggctgtctgcggctttctggatggcttcccagtgcttcaggcggaagcttaagtcccactgcagcgcttcggcggatttgccgacgccagcggtgcgaacgataagtcccatgccgtccggcagctcaaggctggccagcgcttctttgagttcggtgcgatcgtcaccctcgatgcggcgtgaaataccgccagcgcgtgggttattcggcatcagcaccagatagctacccgccaggctgataaaggtggtcagcgcggcgcctttattgccacgctcttctttatcgatctggacaatcacttcctggccttcacgcagcacgtccttgatgtttggacgaccgtgagaattgtagttggcagggaagtattcgcgggcaatttctttgagagggaggaaaccatgacgctcggcaccataatcaacaaatgcggcttcgaggctaggttcaatacgagtgattttgcctttgtagatgttcgcttttttctgttcgtgcccggggctttcgatatccaggtcgtacaggcgctgcccatcaacaagggcgacgcgcaactcttcctgctgagttgcgttgattaacattcttttcatcgtaacttactcattattcttacattgacgactaagctacgggcagagtaacgccttaccggggaaaaccgatggcctcgtgtctgtttcacgtcgccaacctcacggctgtcgcgcgcttaagaggcgcagagtgtcggtcgcctgtatttcaaacggaaacacagcgcacttatcaggggaactgcctgggatgtatcaccagagaagattccatttatacccatcgtttttcatgcagcaggcgtggcggcttaacctgctcatcttaatcatttgatccagatgagcgccgggatatcccagtgtgaacgccttcctgcgacgtgaaatccatagagcctgtaccggtaaggactgcaacccgcagcccgctaactgtctgaaagatcaatacgtcttacgccattgctgcgttgatgatcggtcagacaaaattggtcattccgctaatttcttgttctaacaagtttcagcacggaatactgcatcattattccattgctaagctcgttatagcaagttgactttcaccttttatcacccggttactcacagttttttcacccgcgtatacagattgttctaataacaaacaaaacgatgatgaagcgtactgtgaaatccggatgatgataaatataagcatataaaaatgagtggcgctaatgcgtcgggctatttagaatcgcgcaccatgaaaactgagatcccaagcgtaaaaatggttgccattgctgatgatgaagccgggcaacgtatcgacaactttttgcgtacgcagctgaagggcgtaccgaagagcatgatttatcgcatcttgcgtaaaggcgaggtgcgggttaacaaaaagcgcgtgaagccggaatataagctggaagccggcgacgaagtgcgcatcccgccggttcgcgtctctgagaaagaagaagaggcggtctctccacacctgcaaaaagtagccgcgctggccgatgtgattttatatgaagacgatcatatcctggtgcttaacaagccttccggaacggcggtacacggcggcagcggattgagctttggcgtaattgaaggtctgcgcgcgctgcgtccggaagcgcgtttcctggagctggtgcatcgcctggatcgcgacacctccggcgtgctgctggtcgccaaaaagcgctccgcgctgcgttccctgcacgagcagctgcgcgacaaaggaatgcagaaggattacctggcgctggtgcgcgggcagtggcagtcgcatactaaagtggtgcaggcgccgctgctgaaaaatattctgcagagcggtgagcgcattgtgcgggttaaccaggaggggaaaccgtcggagacgcgctttaaagttgaagagcgttatacccatgcgacgctggtgcgctgcagcccggtgaccggtcgtacgcatcaaatccgcgtgcatacgcaatacgccggccaccctattgcttttgacgaccgctacggcgaccgtgaatttgataagcagctggcgggcaccggccttaaccggctgtttctgcatgcggcggcgctgaagtttacccatccgggtagcggggagattatgcgcattgaagcccccttagataatcagcttaagcgctgcctgcaggtcttgcgtaacgcgaaatgaccgcgctcaggctcagggtttgagccacctggcaagccaggggaaaacttcatcctgctgttgttgattaaaaacgtggcccagttccggccacgtttttgtttccagcttatcctgcgcgttttgcgacgcccacactttatgtacttttgcgaaggcgtcgttaacggcttccgccgggaagagcttatcttgtccgccgctgtaaataagcatcggttttggcgcggcaatgctggcgatatcgggaatatcgaggcgtccggataagccagggtgaagcatataaaacgccgactggccgcgcaaaacgttgttgccaggctgcatcaggccgttccaggttccaaaccaggagataaccgcagtcgcggcgactttgtcagacagggcggccagctgccaggcgcgaaaaccgcccattgagaaacccacgactccaatgcgttgactatcaaccgtttttaaagtgctgaggaaatcgacggtacgcagatcttcataggcaacttcacctgccagcgagcgccccaggttaaagtagttgctggcgagggcctgctgctgctcgtagaccatcggccctcggtccccccaacccgggctatcaatggcgatgacgacatagccgcgctgcgccagttcatcgccgataaaccgaccgctgaaaaatttatccgcccacgcctcggcgctggccagccgtgcggcgtcgttccacggacggattagcttctccttaccgatatcaaactttgagccatggtcgtgcagcagaacaattgccgggtgagggccgggggaatttggcgtcaacatcagcgcggcaatcctgttatcgtcggttacgttgaaggccagcttctcggcggtatacgcgcctcgattttctctcatcagcgtttgcggcgcgaaggggagtgtcgacgccggggttagcagagactgccgaagcagcgtacgggcctgctgtcgccattgctcaaaatcacggtagtggccagagagccacgagtccgggtaggtcatctgcgctttcagctgctgccaggaggcggggagattgccctctacgatgccctggcgctgccagtcatgggcattaacgccggcggcggccagcagggtgagggtcaaaagcgtagcgcgggttggcatagtggctccatttaaaaataaaacaacgtttcataatggattctaatggcgcgggtaaaataaactgtgacaggcgatgcattaattaagttggggtaaacctgctctgctccgttgggcagcgggtaaaacgcgttgtaaagcggcggcacgcggcctcaggaagagaccgcgtgggatcgggaggcctttatcatgtttacgtgagcaggggattcaacgcttcccggcgcagcatctggcacagggcaatgagcggcaaaccgaccagcgcgttgggatctcgcccctcaagccgttcgaatagcgtgatgcctaaaccttcgcttttaaagcttccggcgcactgcagcgggttttccttgcggatatagctctcaatttcctggtcgcttaaacggcggaaatgaacgtcgaaaggttcgcattccgtttgtagatgaccgttggcggaattgtacagcgccaggccggtatagaacgtgacgatggtgccgctggcctttctcagctggcgatgggcgttttcttccgtatgcggtttgccggtaatttcaccgtccaggacacaaacctgatcggagcctataatgaggtgctttgggtagcgtgcggcaagggcctgcgcctttgcctgcgccagacgcatcaccagctggcgggcaggttcgccgggcagcggggtttcatcaacgttcggcgcagcgcattcaaaaggcaccgacagtttttccagcagcattcgccgccacggcgaggttgacgcgaggattagttcagacatattttttcatccacatatagcgcttcgcagagcatcattttaaactatgcgccgcaatgtgtgcgaataaatggcaaaaggcaacctgaggctgcctttttctttgactctatgacgttacaaagttaatatgcgcgccctatgcaaaaggtaaaattacccctgactctcgatccggttcgcacggctcaaaaacgcttagattaccaaggtatctatacccgtgatcaggctgtgcgtgtcgctgattctgttgtcagcgtggacagcgatgtggaatgcagcatgtcgttcgctatcgataaccagcgtcttgccgttttaagcggcgatgcgacagtgtcggtaaccctcgaatgtcagcgttgcgggaaaccgttcccccatcatgttcacacaacgtattgtttcagccccgtcagaaatgacgaacaggccgaagcactgccggaagcgtatgagccgattgaggttaacgaattcggtgaaatcgatctgctggcgctggttgaagatgaaatcatcctcgccttgcccgtagttccggtgcatgattctgaacactgtgaagtgtccgacgcggacatggtctttggtgaactgcctgaagaggcacaaaaaccaaatccatttgccgtattagccagcttaaagcataagtaattgaggagtaaggtccatggccgtacaacagaataaaccaacccgttccaaacgtggcatgcgtcgttcccatgacgcgctgaccgcagtcaccagcctgtctgtagacaaagcttctggtgaaaaacacctgcgtcaccacatcactgccgacggtttctaccgcggtcgcaaggttatcgctaagtaatcacgcattactccatggatttcgcgttgcaagaagacgcaagcgagagaagcaccaggagcatagctcactatgtgactggtgtgaacgagcgcagtcaatgcacttgccgcgtgaaagacgaagagtaaaagcgtgatgaagcttagtgaggatctccccgggtaactggggaataaccgaaccgagcagcgacgataccttgactcgtctaaccctggcgttagatgtcatgggcggggattttggcccttccgtgacagtgcctgcagcattgcaggcactgaactctaattcacaactcacacttcttttagtcggcgatcccgacactatcgcgccattacttgccaaagctgattttgaacaacgttcacgtctgcaggttatccctgcgcagtcagttattgccagtgatgctcgacccgcgcaagcgattcgcgccagtcgcggtagctcaatgcgcattgcgcttgagttagtgaaagaagggcgggcggaggcctgcgtcagtgcgggtaataccggagcgctgatggggctggcgaagctgctgcttaagcccattgaggggatcgagcgccctgcgctggttactatgttgccgcatcagctgaagggcaaaacggtggtgctggatttaggcgctaacgtggattgcgttagcacaatgctggtgcagtttgccatcatgggggcggttcttgccgaagaagcgatcggtattaaggatccccgcgttgcgcttctgaatatcggcgaagaagagatgaaaggtctcagcagcattcgcgacgcggcggcggttttgaagactctgccgaccctcaactatattgggtatctggaagccaacgaattgttgacgggcaagacggatgttttggtttgtgatggattcacgggcaacgtcacattaaaaacgatggaaggtgttgtcagaatgttcctttcactgttgaaatcacagggagaggggaaaaaaaggtcgtggtggctgcttttattaaagcgttggttacaaaaaagcctgtcgaggcgattcagtcacctcaaccccgaccagtataatggtgcctgtctgttaggattacgcggttccgtgattaaaagtcatggggctgccaatcagcgcgctttttgcgtcgcgatagagcaggcagtgcaggctgtgcagcggcaggttcctcagcgaattgccgctcgcctggaatctttataccctgcaggtttcgaattgcctgaaggcggcagaagcggaaattcccggcctcaaacccggatgaccggcaacgactgacgcctcgcagtttgagttaacccggtatattacccaagagtgactgagcgtacatgtatacgaagattattggtaccggcagctatctgcctgagcacgtgcgtacgaacgctgaactggaaaatatggtcgatacgtctgacgagtggattgttactcgtaccggtatccgcgagcgtcgtattgccgcaccgaatgaaacagttgctacgatgggccttgaagccgctaagaatgcgctggacatggcgggcgtcaagccggagcaaattggtctgattattgttgcgaccacctccggtacccatgcgtttcctagctcggcatgccagattcaatcaatgttgggtattaaaggctgcccggcgtttgacgtcgctgcggcctgcgcggggttcacctacgcgcttagcgttgccgatcaatacgtaaaaaacggtgcggtggattacgcgctggtgatcggcgctgacgtgctggcgcgcacctgcgatcctgccgatcgcggaaccattattatttttggcgatggcgccggtgccgtggtgctgggtgcttctgaagagccgggcatcatctccacccatctgcacgcggatggcagctacggctcgctgctgacgctgccgaacgccgatcgcgtcgaaccggaaaaccccatctatctgacgatggcgggtaatgaagtctttaaggtggcggtaaccgagctggcgcacatcgtggacgagactttagctgcgaacaacctcgagcgctctgcgcttgactggctggtgccgcatcaggccaacctgcgtattatcagcgccacggcgaagaagctgggcatgtcgatggacaacgtggtcgtcacgctcgacagacacggcaatacgtcggcggcatctgttccctgtgcgctggatgaagccgttcgcgatggccgcattcaacgtggtcagcttattctgctggaagccttcggtggtggtttcacctggggttccgcgctggttcgtttttaggataaggatttaaacatggcgcaatttgcttttgtgttcccgggacagggctctcagagtgtcgggatgctgtcagatatggcggccgcttacccggtcattgaagagacgttccgtgaagcctctgcggcgttgggttacgatctgtgggcgcttgcacagcagggcccggcggaagagttgaacaaaacctggcagacgcagccggctctgctgaccgcctccgtagcgctgtatcgcgtctggcagcagcagggcggtaaagcgcccgctttgctggcgggccacagcctcggcgaatactctgcgctggtatgcgcaggcgttatcgattttgctgatgccgtccgcctggttgagatgcgcggcaggtttatgcaggaagcggtaccggaaggtaccggtgcgatgtccgcgatcatcgggcttgacgacgctgcgattgccaaagcctgcgaagaatctgctgaagggcaggtggtttctccggtaaactttaactcgccaggacaggtcgttattgccggtaataaagaggccgtagaacgcgcaggggcggcctgtaaggctgcaggcgctaaacgtgctctgccgctgccggtcagcgtcccatcccactgcgcgctgatgaagcccgcagcggagaaactggccgttgagctgcaaaaaataaccttcaacgcgccagctattccagtcgtgaataacgttgacgtgaaaagtgaaacgacgcctgaagctattcgcgatgcccttgtccgtcagctgtatagcccggttcagtggaccaaaaccgttgaatttatggcatcacagggcgtagagcatctgtatgaagttggcccgggtaaagtcctcaccggtctgactaaacgtattgttgacaccctgaccgcttccgcgcttaacgagccggcagctatgtctgcggcgcttgagcaataaaagaggaaaaccatgagttttgaaggaaaaatcgcgctggttaccggtgcaagtcgcgggattggccgcgcaatcgctgagacgctcgttgcccgtggggcaaaagttatcggtactgcgaccagcgaaagcggcgcgcaggcgattagcgattatttaggtgctaacgggaaaggcatgctgctgaatgtgaccgatcctgcatctatcgaatctgttctgggaaatattcgcgcagaatttggtgaagttgatatcctggtgaacaatgccgggattactcgtgataacctgttaatgcgcatgaaagatgacgagtggaacgatattatcgaaaccaacctgtcatctgttttccgtctgtcaaaagcggtaatgcgcgctatgatgaaaaagcgtcatggacgtattatcactatcggttctgtggttggtaccatgggaaatgcgggtcaggccaactacgctgcggcgaaagcgggtctgattggcttcagtaaatcactggctcgcgaagttgcgtcccgcggtattactgtaaacgttgttgctccgggctttattgaaacggacatgacgcgtgcgctgaccgatgagcagcgtgcgggtacgctggcggcagttcctgcggggcgccttggctccccaaatgaaatcgccagcgcggtggcatttttagcctctgacgaagcgagttacatcactggtgaaactctgcacgtcaacggcggaatgtacatggtctgaccgagatttgcgcaaaacgttcaggaaccgcgcagtccgtgcggttctctgtaatgttttgtacaaaatcatttgcgttatgagggcaaacagccgcaaaatagcgtaaaatcgtggtaagacctgccgggatttagttgcaaatttttcaacattttatacactacgaaaaccatcgcgaaagcgagttttgataggaaatttaagagtatgagcactatcgaagaacgcgttaagaaaattatcggcgaacagctgggcgttaagcaggaagaagttaccaacaatgcttccttcgttgaagacctgggcgctgattctcttgacaccgttgagctggtaatggctctggaagaagagtttgatactgagattccggacgaagaagctgagaaaatcactactgttcaggctgccattgattacatcaacggccaccaggcgtaagtgaacatctccaggcggtcactcgaccgcctgagttttatccatattttgtcccacaagaatctattttccctccctggaggacaaccgtgtctaagcgtcgtgtagttgtgaccggactgggcatgttgtctcctgtcggcaataccgtagagtctacctggaaagctctccttgccggtcagagtggcatcagcctgatcgaccatttcgatactagcgcctatgcaacgaaatttgctggcttagtaaaggattttaactgtgatgacttcatctcgcgtaaagaacagcgcaagatggacgccttcattcaatatggaattgtcgctggcattcaggccatgcaggattctggccttgaagtgacggaagagaatgctacccgcatcggtgccgctattggttccggtattggcggacttggccttatcgaagaaaaccacagttcgctggtaaaaggcggaccgcgtaagatcagcccgttctttgttccttccacaatcgttaacatggtggccgggcatctgaccatcatgtttggtctgcgtggaccaagcatttccatcgcgaccgcttgcacctctggcgtccacaatattggtcacgcagcgcgcgttatcgcttatggcgatgctgacgcaatggttgccggtggcgcagaaaaagccagtactcctctgggcgtaggcggctttggtgcagcacgagcgctctccacgcgcaatgacaacccgcaggcggcaagccgtccatgggataaagagcgtgatggtttcgtactgggcgacggcgcaggcatggtcgtgctggaagagtacgaacacgcgaaaaaacgcggcgcgaaaatctatgcggaaatcgtcggttttggtatgagcagcgatgcctaccatatgacttcaccgccggaagatggcgctggcgcagcgctggcgatggttaacgctattcgcgacgcgggcattgaagcaagccagattggctacgtcaacgcccacggcacctctacgccggcaggcgataaagcagaagcgcaggcggtgaaatccgtcttcggtgacgctgccagccgcgtcatggtcagctcgactaagtcaatgaccggccacctgctgggcgccgcgggcgcagtagagtctatctactccatcctcgcgctgcgcgatcgggcggttccgccaaccatcaacctggataacccggatgacggttgcgatctggacttcgttccgcacgaagcgcgtcaggttagcgatctggagtataccctgtgtaactccttcggcttcggcggcactaacggctcgctaatctttaaaagggtgtgatgcgcgcctgacgccacgcctttgctgacgtcaatgctcatcgaaaaactggcccgctcgtcgggcctttttttattcagttttctccgcttgttcaatgtatctcctcctgcgaaactaaccggccagcgataaggagacttttatgtatttgataaatggcgctgaaagtgaaacgcttgcggtgaacgatcgcagcgttcagttcggcgatggctgctttaccacggcgcgcatcgtcagaggccgggttcagctgctgtcagcccatctggcccgcctgcagaaggcctgtgaacagctctttatcccctacgacgactgggcgctattagcgcaggagatggcgcatctggcgcagccccatcaggatggcgtgctgaaggtcatcatcacgcgcggggcgggggggcgcggatacagcgctgccggctgcgtgaatcccgtgagaatcctcagcgtatcgccctggccggagcactatcttcgctggcgcgaggaggggatctccgtgacgttgagccccgtcaggctgggacgcaatccctcgctcgccggcctcaaacaccttaatcggctggagcaggtgctgattcgttctcatcttgagcagacggacgccgatgaagcgctggtccttgacagcgacgggtggcttacggaatgctgtgccgcgaacttattctggcgtaaaggatccgacgtctttaccccgcgcctcgatcgggcgggggtcaacggtattatgcgccagtacattctcgctaagctggcaccatcgccgtttcgcgttgtcgaagccaccatgcgccccgaggcgttacgcgaagccgacgaggtccttgtctgtaacgcattaatgccgctggtgcctgttcgccgctggaacgataaacgttggtccacgcgcgagctttatcattttttagcccccttgtgtgagctgtctgattagccatgaagaaaatgttacgtttcattctgctgttggtggtggtgctgggcatcgccgcaggcatcggtatgtggaaagttcgccagctggcggacagtaagttactgattaaagaagagaccatctttacccttgaggccggaacggggcgcctggcgcttgggcaacagctgtatagcgataaagtcattaaccgccctcgggtgttccagtggctgctgcgcatcaagcctgagctgtcccactttaaagccgggacctatcgctttacgcctgatatgacggtacgccagatgctgcagctgctggccagcggtaaagaggcgcagtttccgctgcgcttcgttgaaggtatgcgggtgagtgactacctgcgtcagctgcgcgatgcgccttacgtcaagcatacgctggcggatgatagctatgaaactgtggcgaaggcccttgaactggaacatcccgattgggtcgaaggctggttctggccggatacctggatgtataccgccaataccagcgatgtggcgatccttaagcgcgcgcatcagaagatggttgccgcggtcgataaagcctgggaagggcggatggagaatctgccgtatcatgataagaatcagctgctgacgatggcctctatcattgaaaaagagacggcgctgccggaagagcgcgaccgcgtcgcatcggtatttattaatcgtttacgtatcggcatgcgtctgcaaaccgatcccaccgtgatttacgggatgggggagagttataatggcaaattgacgcgtaaagacctggaaacgccgaccgcttacaatacctatgccattaacggtatgccgcccggacccatcgccgcaccgggcgaggcctcgctgaacgccgccgcgcatccggcgaaaacgccgtatctttattttgtcgcggacggcaagggcgggcatacgtttaacaccaacctggccagccataaccgctcggttcaggattatttgaaagtacttaaggaaaaaaatgcgcagtaactatatcgtcatcgagggcctggagggcgcagggaaaaccaccgcgcgtgaatgtgtggtagagacgctaaaacagctgggcgttagcgatatggtgtttacccgcgaaccgggcggcaccattctggccgagaagctgcgcagcctggtgctggatattcagtccaccggcgatgaagtgattaatgataaagcggaagtgctgatgttttacgcggcgcgcgtacagctggtagagacggtgattaaacccgctctggcgcgcggtcaatgggtcattggcgatcgtcacgatctctctacccaggcctatcagggcggcggtcgcggtatcgaccagacgatgctggcgaccctgcgtgacgcggtactgggagactttcgtccccatctgacgctttatcttgatgtgactccggaggtgggcctgaagcgcgcccgcgcccgcggcgaacttgaccgaattgagcaggagtcgctggatttctttaatcgaactcgcgcgcgctaccttgaactggcggcgcaggatcccaccatccgtaccgttgacgccacccagccgctggaggccgtcgagcgcgacatccgtgcggtggtcaatcagtgggttgcggagcaactcccatgaaatggtatccgtggttacgcccgccctttgaacagctggttgccagctatcaggcgggacggggccaccatgcgctgatggtccaggcgctgccgggcatggggagcgatgcgctgatttacgcgctttgtcgctttctgatgtgccgccagccggaagggcataaaagctgcggtcattgccacagctgtcagctgatgcaggccggtacccatcctgattattatgcgttgaccccggaaaaggggaagagctcgctcgggatcgatgccgtgcgcgaggtgagcgaaaagctttatgagcacgcccggcttggcggcgcgaaggtggtgtggataggcgatgccgctatgctgacggatgcggcggcaaacgcgctgctgaaaacgctggaggagccgccggagaatacctggttcttcctggcctgtcaggagccagcgcgcctgctggcaacgctgcgcagccgctgtcgtttgtatcaccttgctccgccttcagaacgctacgcgctggcgtggttagagcgggaagtgacgatgtcacaagacgcgctgctcgcggcgctgcggctgagcgccaacgcgccagcggcagcgctggatctgctgcaggattctcactgggcaccgcgccagcagctttgtcagatcctgggtaatattttaactcacggcgactggctgacgctgttgccgattttgaaccatgaacaggcagcgattcgcctgcactggctggcatcgctgctggtcgatgcgcaaaaaaggcagcaggggattacgcttatcagcaatccggacgcctggccactggtcaatcagctggccgctgcgctgccggcggcgcgcctgcaggcgattgcgcgtgacgtcagcgcctgccgcgaacagctgttgagcgttgtcggcattaatcgcgaactgctgctaaccgagcgccttctgcgctgggaacattacctgcaacccggggcggttcttcccgtatcccacctctgagagagacatcatgtttttagtcgactcccattgccatctcgatggcctggattatcaaacgctgcataaagatgtggacgatgtactggcaaaggcttccgcgcgcgatgtgaaattttgcctggcggtggcgacgacgctgccgggataccgcggtatgcgcgagctggtggggcagcgtcacgacgtcgttttttcctgcggcgtccatccgttaaaccaggatgaagagtatgacgttgaagagctgcgcaaactcgcagcagaggacggcgtcgtcgcgatgggcgagaccgggctcgattatttctacacgccggaaacaaaagcgcgtcagcaggcgtcgtttcgcgatcatatccgtataggccgggagctgaataagccggttattgttcacacccgcgatgcccgcgccgatacgctggaaattttacgcgaagaaaaagtgacggattgcggtggcgtactacactgtttcactgaggatagggagacagcgggtaagctgctggatatggggttctatatctcgttttccggcattgtgacgttccgtaatgcggagcagcttcgcgatgctgcgcgctatgtacctctcgatcgcctgctggtggagaccgattcgccgtatctggcgccggtaccgcatcgcggcaaagagaaccagccggcaatggtccgggacgtcgccgagtatatggcggtcctcaagggcgtatcgctggagcagctggcacaacagacgactgaaaatttcgcgacgctttttcatattgacccctcccggctgcaacctctctgatattgcttattattttaaggctcgtaattaatagctaaagcgagtaaagttcaccgccacaaatggggcggtgaaggttttttggcaacattcagacacgacttatgtaaatcaatgtcagtttttaatgggtgtctgattgaaacgtgatagccgtcaaacaatcatcccggtaattattttactctgtgtaataaataaagggcgcttagatgtcctgtccacggcgcggttctccccccgggccaatgcgtgaaaacgtaaaaaagcaccaaatactcaggagcactctcaattatgtttaagaatgcatttgctaacctgcagaaggtcggtaaatcgctgatgctgccggtatccgtactgcctatcgcaggtatcctgctgggcgtcggttccgcaaacttcagctggctgccagccgtagtttcccacgtcatggcggaagcgggcggttcggtcttcgctaacatgccgctgatttttgctatcggtgtcgcacttggcttcaccaataacgacggcgtatccgctctggcatcggtcgtcgcttacggcatcatggtgaaaaccatggccgtggttgcacctctggttctgcatttacctgctgaagagattgcggctaaacacctggcggataccggcgtcctcggcggtatcatctccggtgctatcgcagcctacatgttcaaccgcttctatcgcattaagctgcctgagtatctgggcttctttgcgggcaagcgttttgtgccaattatctccggcctggcagcgatcttcactggcgtgatcctgtcctttatctggccgccgatcggtaccgcaatccagactttctcccagtgggccgcttaccagaacccggttgttgcgttcggtatctacggcttcattgagcgctgcctggtgccgtttggtctgcaccacatctggaacgttcctttccagatgcagattggtgaatacaccaacgcagcaggtcaggtcttccacggtgatattccgcgctatatggcaggcgacccgactgcgggcaaactgtccggcggcttcctgttcaaaatgtacggtctgccggccgccgctatcgctatctggcactctgctaaaccagaaaaccgcgcgaaagtgggcggtatcatgatctccgcagcgctgacctcgttcctgaccggtattaccgagccgatcgagttctcgttcatgttcgttgcgccgatcctgtacatcatccacgcgattctggcaggtctggccttcccgatctgtatcctgctgggtatgcgtgacggtacgtcgttctctcacggcctgatcgacttcatcgttctgtctggcaacagcagcaagctgtggctgttcccgatcgtcggtatctgctacgcgattgtttactacgtggtgttccgcgtgctgatcaaagcgctggatctgaaaaccccgggtcgtgaagacgccaccgaagacagcaaagctggcgcgaccagcgaaatggctccggctctgattgccgcgttcggcggtaaagagaacattactaacctcgacgcatgtatcactcgtctgcgcgtgagcgtggcggatgtggcgaaagttgatcaggctggcctgaaaaaactgggtgccgcaggcgtggttgttgcaggttcaggcgttcaggctattttcggtaccaaatccgataacctgaaaactgaaatggatgaatacatccgcaacagctaagttgtgatatggggagactaaggcagcctacgggctgccttttttaatggccgcaggcgttaaaagcgcgcccgcggctttcgtcacgttaagcagagatcagaactgatagctggccgtaatgctgacgttgcgcggttcgccgtagacgatggaaccatcgatgttggtgtcgtaggttttgtcgaacaggttattgacgttaccctgcacagcaaaatttttagtgacctggtagcgagtgaacacatccaccagcgcgtagctgccttgttccgcacggaacgtcccgtacggcgtcgcggtatctttatacacccggttctgccagttaacgccgccgccgacggtcagttcaggcattaccggcagacggtagcgggtgaacagcttgacgctggtacgcggcaggttgggattcaccgcattgccttcattgtcttcagcgacaaaacgcgtcgccccaaaggtcatctgccagttatcggtaatcgccccgttgatttcgaactccacccctttgcttacggtaccgtcgacggttttataggctgcttctccgttactgccggggatttgcccgccggtcgcctggccgaggttatcctgctcgatgcggaatagggcgagcgtcgtcgttaaccggctgtccatccagtccgacttcaggcccacttcatagttgtttccggtaaccggggtcaggtatttaccggaactatcgcgcttattctgcggctggaagaccgaggtatagctggtgtaggccgaccagctgtcgttgatgtcgtaaaccagcccggcgtacggggtggtatggtttttctccatcgtgtaggtcagcgtctcgatgctccagttgttatagcggacgccaagaatcagatgcagcgggtcaagcagggaaaaacgcgtcgccgcgtacagcgacttcattcgcgtggtatcgtcctgcgccaggctctgcgggccccagctggtttccgggaatgtcgcgctattgaagccatagaagttgccaacttcatcggggaagacgtttgcccacgaactgaaatagcggttgttttgtttactgtagctggtgccgatcatcaggttgtgctggcgaccaaacaggtcgtagccgccgtcggcgaacaggtcaacggcgtcgactttacgtttgccgctattccagccggtaccgccgacgtaatcatagcccgggccgtagctgttataggggcccaccagcattccggtcgctttgttgacgtacgcgtccacgtacatcatcttgctgtcgaacgtgatctcagaatgggtggcattcagcgttgcctgccaggtatcggcaaagcgctgtttcagcgtgacgaagaccttgttgatctctttgtcgttataggcccagtcgggcgcggtgctgtgggcgcggtcatagtggttcttgctgccatcggtattccagcgaggcaggccaccccatgtcgggctattcacgtcgatacgctgatactcgtagccagcggataaagcggacgacgtaccgagatcggcatcaagaatgccggagaagaacgttttttcgctgttatagcgatccagccacgagtcattattttgataaccggcgataatgcgcgcccgtacgctgccatcgtcagtcagcgggctttgcatatcagcaacgtagcgctgcttattccagctgccgtactccgcagagacatttcccttgaactcccgactggtcgcgtgcttgcggatcatattgaccgacgcggcagggttgccggtaccggtcagcaagccgttggcgccgcgtacgacctcaacccgttcgaagagggccatatcggaaagcgcgtcgcccagattccagcgagattcaaaccaggtcggaatgccatcgaccatataattgtcgatctcaaaaccgcgggaataatagctggtgcggtctgagtccgcctggctgctgctgatccccatggtatggtccatgacgtcgcccagcgtttgcagctgctgatcccgcatccgctgttcggtaatgatactgaccgattgcgggatatcgcgctgggccatctccattttagtcccggctgaggtggttctgacgctgtagtcctgctcttgtgtctccgaggcgctatctgcggaaccttctacaataatagtgtcttcggacgtgccggctgcctgactgaggttgggaaagatcgccagcgcgatacccatagcaagcagggacggcgcgttacgcccatcccgaaagttggtggagagagacatcataaacccttgatcgtatgattgttgttatttgctgcggcgcgatagccgcggtagatcgtcagtgcactgcattttctttgaatacaaatgagaaatatacgcattaatatttaatatgtaaacaagtgggaaaacggctgtacccgggtcttgttgaccggtaccggggggcatacagcgaagaaacgcttaatccgtcagcagctaagcgcttgctcgcgtaagaaaaaacgcattcaggttgaaagagggggagtaactcgctcatactcttaggggaatcctgtgcatccgcgtttacctgcagaggcaggccagagcacggtataaaaattattaaggaatcagtcatggcagaagaaacgattttcagcaaaatcattcgccgggagatcccgtcggatgtggtttatcaggatgagctcgtgaccgcttttcgcgacatatctccgcaggcgccaacccatattctgatcgttcccaatatcctgattcccaccgtcaacgatgtgaccgcagagcacgagcttgccctgggacgcatgatgaccgtcgcggcgaaaatcgcccgcgatgaggggcttgccgacgatggctatcgcctgatcgtcaactgcaatcgccacgggggccaggaggtctaccatgtccatatgcacctgttgggcggccgtccgttaggcccgatgctggctcataaaggttaacattcatgcgcgcagctcacttcggcgcacttctggccgtgacgttactggccgggtgcagttcgcatccggaaattccggtcagcgatcagcaaagtctggtgatggaatcaaacgtactggcagcgggcatcagcgctgaagtaccgacggtgaccgcatccgagattcaggcgacggcgaccacccgattgttcaatgaacgccaggtaccggtgaccgtgcattatcgctttttctggtatgacgccagagggctggaaatgcatccgctggagtccgcgcgcagcataacggtgcctgcgcactcttccgttacgctttatggcagcgccaatattctgggggcgcacaaggcccgactttatctttatctgtaagaggtaatcgtaatgattaaactatgtcgctatgcattagttaccgcactggcgatattccttgccggatgcgtgggtcaacgtcaggaacccgctcccgttgaggaagcgcagccgaagccgcagcagcccgttcagccgcagccgactgtgccgactattcccgtgatacctacgcagccgggtccgatagaacacggcgagcagccagcgcagccggcgccgcgcgtgcgtcattttgactggaattccgcggtgcagccgatgattgggcagatgctgcaggccagcggcgtaaatgcgggcagcattttgctggtcgacagcgtcaataaccgcaccaacggcacgttgaatgcgggagaggccaccacggcgctgcgcaacgcgctggaaggcaatggaaaattcaccctggtctcgcagcagcagctgggcgtagccaaacagcagcttggcctgtcgccgcaggatagccttggcagccgcagtaaagcgatgggcattgcgcgtaccgttggcgcacagtacgtgctctattccaacgcgaccggcaacgttaattcccctgagctgaaaatgcagctaatgctggtccagaccggcgaaattatctggtcaggcaaaggtgctgttcagcaacaataagctcacgcgcgacgaagtgctgtcgcgctttttcccgcgctatacgcctgtcgccgcgccgccccaaaacgggctgagcggcggcagctgcattctcagcgatggtcggcaaaagcgggtgctgcgccagccgcacgatccgcatgcgccggcctgcgactttcgccgtcaatatcacgttctgtcacgccttcccgattcgttagcgcccgcgccggtgttttattctcccgcctggatggtggtggaatattgctcaggcgatgtggttaacgcattaccggagtgtccggcgctcgcagggttactgtatcatctgcaccagcagccgcgctttggctggcgtatcgcgctgcggccgctgcttgagcggtactggcaacagtgcagccccgcgcggcgcacaccgcagtggctacgctggcacaaacggctgctgcgtcgcggcgagccccggccgctgcgtctcgccccgttacatatggatgtccatgcgggcaacatcgttcacggcgaggcgggactgcggctgattgactgggaatatgcgggcgatggcgatgttgcgctggagctggcggcggtgtggatcgagcccgccgcgcatcgtcggctagccgcagaatacgcgaggcaggcgagcatcgatgagcttcagctctggcggcaaattcagcgctggcgtccgtgggtgcagctgctgatggcgggctggtacgagcgacgctggcagcaaaccggcgaccgacagtttattgcgctggcggatgaggtatggcgccagttagacaaaaagtaaaaggataagagaggtggatgtgggcccggtaatgttggatgtcgaaggttttgaactggatgcggaagagcgtgagattctggcgcatcctttggttggcgggctgatcctgtttacccgcaactatcacgatccggcgcagctgcgtgagctggtccgccagatccgcgaggcctcgcgcaaccatctggtggtggcggtagatcaggaaggcgggcgcgtacagcgtttccgcgagggctttacccgccttcccgcggcgcaatctttcgccgcgctgcttggcatggaggagggcggtaagctggccgcagaggccggctggctcatggccagcgaaatgatcgccatggatattgatatcagctttgcgccggttctggacgttgggcatatcagcgccgctattggcgagcgatcctatcacgacgatcccgacaaagccctggcgatagctcgtcattttattgacggcatgcacgccgcgggaatgaaaaccaccggtaagcactttcccggacacggcgcggtgacggccgattcccataaagagacgccgcgcgatccgcgcgcggaagcggaaattcgcgccagagatatggccatcttccgtacgctgattggcgagcagcggcttgatgcgatcatgcccgctcacgtcatctacagcgacgttgacccgcgtccggccagcggatctgcgcactggctaaaaacggttctgcgcggtgagctgggatttgaaggggtgattttctctgacgatctgtcgatggaaggggcggcgattatgggcagctacgccgagcgcggccaggcatcgctggaagcgggttgcgatatgatccttgtctgcaataatcgtaagggtgcggtcagcgtgctggataacctgtcgccgatcaaagcagaacgtgttacgaaattgtatcataaaggttcctttagccgtcaggcgttaagggattccgcccgctggaagacgatcagcgcgcagcttgagcagcttcacgcgcgctggcaagaggcgaaatccgcgtaataaacctgaaaggcgttgttgtctggtgaggatgcgatgattatctatttacatggttttgattcaaacagccccggtaaccatgagaaggtgcttcagcttcagtttattgaccccgatgttcggttgattagctacagcacgcggcatcccaaacatgatatgcagcacttattaaaagaggtcgataagatgctgcagctgagcgccgacgatcggccgctgatttgcggcgtgggtctcggcggcttctgggcggagcgaattggctttctttgcgatatccgccaggccatttttaacccgaacctgtttcccaatgaaaacatggaagggaaaattgatcggccggaagagtatgcggatattgccaccaaatgcgtgaataatttccgcgaaaaaaaccgcgatcgctgcctggtggtgctatctcgtcaggacgaagcgctgaatagccagcgttcggcggacctgctgcaccattactatgagataatttgggatgaagagcagacccacaagttcaagaatatctccccgcatctccagcgcataaaagccttcaaaaccctcggctaaacgcgcgccggcccgcaatgtgaaaacatcgcgggcttttttttattcatttttgcgattctgcgctcaaaaaatatgcggtaaaacttgatgcatatcaattttggtatgaccaatgcaccgttcatgttattctcgatctcgctgaatggtttcactgccgtaacctgttgttaattaaaggttatatctataacttttagttaacaattggttaataattttagggggtcgcgtgactacgccattgaaaaaaatagtgattgtgggtggtggtgccggtgggctggagctggctacccagttgggtaaaaagctgggccgtaataaaaaggccaaaatcacgctggttgatcgtaaccacagccacctgtggaaaccgctgctgcatgaagtggcgaccggttcacttgatgaaggtgtagacgcgctgagctatcttgctcacgcccgtaaccacgacttccagttccagctgggatcggtggtggatattaaccgtgaaaccaaaacgatcaccctcgccgagctgcataacgagaagggcgagctgctggtgcccgagcgtaagctgccttacgacacgctggtcatggcgctgggaagtacgtcgaacgacttcaacacgcctggcgtgaaagagaactgcatcttcctcgataatccgcatcaggcgcgtcgtttccatcaggaaatgctggatctgttcctcaagtattcggcgaacctcggggcgaacggtaaggtgaatatcgccatcgtcggcggcggcgcgaccggcgttgagctgtcggccgagctgcacaatgcggtgaaacagctgcacagctacggctacaaaggtctgactaacgaagctctgaacgtgacgctggttgaagctggcgagcgtattctgcccgcgctgccgccgcgcatttccggcgccgcgcacagcgagctgaccaagcttggcgttcgcgtattgaccaaaaccatggtcaccagcgccgatgcaaacggtctgcacacgaaagaaggcgaatttatcaacgctgacctgatggtctgggcggccgggattaaggcgccggactttatgaaagagattggcggtctggagactaaccgtattaaccagctggtggtcgaaccgacgctgcaaacgacgcgcgatgcggatatttacgccatcggcgactgcgcgtcctgcgcccgcccggaaggcggttttgttccaccgcgcgctcaggctgcgcaccagatggcgacctgcgccctgcacaatattctggcgcagatgaaaggtaagccgctgaaagcttatacctataaagatcacggttcgctggtgtcgctctctaactattccaccgtgggcagcctgatgggcaacctgatgcgcggttcaatgatgatcgaaggtcgcattgcgcgcttcgtctatatctcgctgtatcgcatgcaccagattgcgctgcacggctactttaaaaccggtctgatgatgctggtaggacgtatcaaccgcattattcgtccgcgcctgaagctgcattaatgtctctgggcggcaaagccagaaggttttgtccgcccgtttgcttttcgcattaagagactcatagccagaatatcctcctttccttgccggaaaaccctctcagattcctccgaatcccgttgatttgccacacgttcacgcacttttcatccgctttcttatttgcaagcctgatgcctggattgcaaaattacgggcaatagcaacgaaggaggaagtcccgtgaataaatcaatgttggcgggtataggaattggcgtggctgccgcgctgggcgtcgcagccgttgccggtcttaacgtgttagatcgcggcccgcagtatgcacaggtagtgtccagtacgccgataaaagagagcgtcaaaaccccgcgccaggagtgccggaacgtcaccgtgacccatcgtcgaccggtgcaggatgaaaaccgcatcgccggatccgtgctgggcgcggtagccggcggggttattggccatcagttcggcggcggacgcggccgcgacgttgccaccgtcgtaggcgcgctgggcggcggctatgccggtaaccagattcagggctcaatgcaggaaggggatacctacaccacgacgcagcagcgctgcaaaacggtgtacgataaatcagaaaaaatgctcggctacgatgtcacttacaaaatcggcgaccagcagggcaaaatccgtatggatcgcgaccctggtacgcaaatcccgctggacagcaatggccaactgattctgactaacaaagcgtaaaaaagatgtgtatctttattcgcccctcaggctctctggctgaggggcttttttatcagaagctcaaagcgtagttcaggccgaaggtgcgtccgcgacctttatactcgtagagagagctgctgccgtaggtcgggctatacagcagcggcgcgcgctggccccagacggtgacataatcttcattgagcaggttctcaatgctgaaggtcagcttgccgagggggagcgcgtagctgccgataaagtctaccgtattgtagccgtcgagcttgttgccgctggcatcgctgatatcaaacacctgctggctttgcacccgcagcgaccacggctccggcgcccagcccacccacgcggtggcttttgacggcgaggcgagagtgacgtcccacttctgccagctaccgtcgcttttcacctgcgatttcagcacgttaaagttagctccggcgctccagtcgctgttcgggaagtagtagtccaccgcgccctctacgccataaatacggcgtttatcggactgcacatcgatggtcatatcggtacggttaacgacgatcgttttatcggaggtcgagtagtaagccgccagctgagtgcgcagattatcaccggtgtagcgccagcccagttcgtacgagttaactttaattccctgcagcggcgaatcgccaacgttcacgcttgagataagcggaagatggccgttgaccgccgcgccgtactttccgatgccgtagtatttgcccggatccggcagctcaacgccctgagagaagttaaaccaggtctgctggcgatcggtgagatgggcgacaatcccggcgttaaacaggaagttgtcgtaatcggtttttccgcccggaatggcatccgctgagctgaccttgccgctggcgacatcctgctgctgggcatagccgacaaaatcatcgacccggttttccgtccactgataacgtacgccgccgctgatagtgaagatgtcgttcaggtcatagctggactgcaggaacggcgccaggttggtaatgctgtagccgggataacggccggtggtgtagatagcctggttattcagaccgccggaagacatagactggcccaaatcgaagaacatctgattggcgttgaaggtttcgtggtcggcgtccactccccaggtcagatcccagccatccagcggctggctattcagggtgatcttcgcgccgtactgatcggtatcctgctttgaagaggagaagctgctgacctggcctttgctgagcgtagggaaagggtaaaaagtcagggattcatcacgataatagacctggctgaccagattctggccgaggaaatcggcatcggaatactgcaggcttatcaggtgacgttcggtgccggggacgcggtcggagttcaggccatcggtggtaaaggctttgccgtcgccggtcaccgccgacatatttttcccgaggtacagaccgtaatcgtcgccctggcttttatagtactgggttaccagctgcagctgacggttctcgtcaatctcaatggttcccgttcccatcacatccaggcggtcggaatgctgaagcccggtctgggtattatcaaggatcagcgcatcattattgccatcataccagccgccaaaacgctgataggcgaccgataaacggccggaagcgtggtcggtaccgccgctgaccgctgccgccacgcgttcatcatgatcgttgctgttggcaaaaccggttttgctccccagctccagatcgacctgacgctcctgctggccctttttggtgacgatattaataaggccgccggtactaccgccgccgtacagcgatgtggcgccggagatcacctcgatatgctcaatgttaaacggatcgatagaatccagctggcggctgtcggtacgggaggagttaaggcgaacgccgtcaatcagcacgacgatcgcgcggccgcgcatattcatgccgtagttggtgcgtccctggctgctgacgtcgatgccggggatcagctgcgccagcacgtctttaaattcttttccgccctgaacttgctgttcaatttcctggccttcgataacccaggtggtctgggccatttcagcgacggtgcggtgcgttcggtttgcgctgacgatcatgctgtcatcagcggcccaggcgggcagggcggttgccagcagcagtgggttaagcacccagagacgcttgttcatgctcattccttttatgagtttatgcccctcattcttcaagttgcaggtgtgttgactgcggattactcggcccatccatgggcctcgcccctacggggccagcgctagcgcagatcaaggcacaagcgccatgtcctgcaactcgaattatttagggcttacgatatcgttgttttcgttattcggtacgggcgtaccggttgttacatggtgaaatatacagaaacgtttaacaccgaattttgcccgtattgattattgttatcaatatcattctcgcgaaatgaacaaaataaatgactgaaaacattgcgttatgtagggataaaggggaggggaaccggtggggagcccaccggtaagcgaggtcttagcgctgaagaacctgaggccacagacgcagcgtggtctcggcgatttgcatgattttagtgaagtcggcgccttcgcgggcgctgatcgacatgccttgtaatatgcagttgaggaactgcgccagctgacgtacgtcgccgtctggcggcagctcgccgcgcagctgccgctgctggagaaactgcgttagcgtctgttcctgcatcgcgtgccgggacttaacggtattggcgatatcggtggacgccgccgccagcgctgcggaggtattaatcataaagcagcctgccggcgtttctttgctggtaaagcaagtcgcgacggcggtgaagtagtcgcgtaacgctcgatcgacgcttttctcttcgtcaaagaggagcgcttcgtgcctggcggcaaaacgcgcgatgtagcgatccagcaccgcgcgaaacaacccctctttattcacaaattccgcgtagagcgtaggcgcttttgcgcccgtcgcctccactaaatcggcgagagaggtcgcttcatagccgtgctgccagaagagtgtcatggccttatccagcgccgcttccctgtcgaacactttaggtcggccacggcttttttttgtgcaactttgaacgtcagttgtcatggtgccgctgtacctgtgttggtttgttgaaagggcattataaaaataaaccttacgtgctaccagcgatgttgctctaaaaataaataattcatatatgtatgaattttaagctgtttataaatagttaaacggtcgttataaaaatagtttgacgtgtgatgtggatcacattatcatttccctatcgatcgttaattaaatgcgttcgcccctacaaaaacattcatctgcacaggtataacaatcatgaaaaatgttaaaacactcgctatcgccgctgttcttagctcactctctttcgccagcttcgccgctgtagaagttcagtcaacgccggcgggtcagcataaaatcggtaccgtttccgcctcagccgggaccaacctgggttcgctggaagatcagctggcgcaaaaagcggaagagatgggcgcaacctcttaccgtattacgtccgtaaccggtcctaacacccttcacgggactgcggttatctacaaataattgttgcgctacccctgttatgccactgactacgcgcggatctgacccccttcagcagtccgcataaagtaagaagtacgttgttctctgacgagaggcggtgcccgccccttatatggcgccgcaacccgcagaaaagcaggaccctgtttgattattgccataaaaaaaccgcctcagtgaactgaaggcggttttttttcgtcggcagtttagcgaactagagcggctgctccgttacgcgatggtggcgggtgacgtcaatcggcatgcccgaacgcagcatcatcgcgcgttccattacctcggtgtcggtcaactgtgcctgcttaaacgcctgcatgctgtcggtaagggtaatgggcagcgtctgcgggtcgtcatcaatatgttttgacagcggctgatggacctccaccagacgggtgccgttcggctccacggacaccttgattggcgtattgataatcgtcaccctggtgccaggggtgatttcgttgtacaacgctttgatgtcgtcatcgcgcaggcgaatacagccggagctgacgcgcatgccgatgccgaagtcggcgttggtgccgtgcagcagatacacgccgccgtacgccgccaggcgaatagcgtggtgccccatggggttatccgggccagcgggcatgacggcgggcaggtcaatgcccattgctttatagcgggcgcgaatattggccgtcggcgtccaggtcgggttggcgcgtttgtcggagacggtggtaaccattgtcggcgtgatggtgtcgccgccgagctggccaatgccgataggataaacggtcacttcacttcttcctggcggatagtaatagaggcgaagttcggccaggttaaggactaatccttcgcgcggcgcgtcgggcagcagggtttgcagcggaatcgtcagcacgctaccggctcgtggaacatacggatccaccccggggttagcctggagcagggccagaaaaccgacgttgtactttttggcgatcgcttcgagcgagccgccgttattctcgacgacatgaaactggttttgcccgaccagacggctgcccggaggcggcaggggccaggtattggcgcgagcgggcagcgccagcgcggcggcgatagctatcatccccagccagagaaaaattcgcgtaaagcttttcatcaccctaattccataataagtaagtggttatttttatacgaaaagtccctgagattatggcgaagcgagtgtctggaagttcagagggattgcaaaatgtttgtaaattttgccgaacaagtggggaggggcgggatacgacgcacaggccgtatcccgcctgctatcaggcggcggcgttctcttcgagctggcgcataaactggcgcacccactccatccgcgttttacgctcggcaaggtcctgcgtaaacttgaggcgcgttgggccatccaggcgatagtgctgaggctgcttttgcaacaggccaatcagccacatcggattcacgttattcttctcgttaaactcaatggtgccgcccttttcgttgctctccagcttgcggatccccagcttctgcgcctgctggcgcagtcgggcgatatcgagcaggtttcttgccggatcgggcagcaggccaaagcgatcgataagctcgactttgatctcctccagctcattctcgttcttcgcgctggcaatgcgtttgtagaacgacaggcgcgtattcacatccgggataaagtcatccggcagcagcgacggcatccgtagctcaacttcggtctgctgactggtaagatcctccagcgagggttcgcggcctgctttcagcgcgtcaacggcattttccagcagctccatatagagggagaagccgatggtttccatggaaccgctctgatcctcgcccaacagttcacccgcgccgcgaatttcgaggtcatgcgttgccagagcgaaaccagcgccgagatcttccagcgatgcaatcgcctcaaggcgtttttgcgcatcggtggtcatcgccttcggatgcggggtcagcagccaggcataggcctgatggtgcgaacgaccgacgcgaccgcgtagctggtgcagctgtgcgagaccgaagtgatcggcgcgctcgataataatggtgttcgccgttggaatgtcgatcccggtttcgataatggtggtgcacaccagcacgttaaagcgctggtgatggaaatcgttcatcacccgttcgagttcgcgctcgcgcatctggccgtgaccgatggtaatgcgcgcttccggcaccagctccgccagcctctcggcggctttctggatgttttccacgtcattatagaggtagtaaacctggccgccgcgcagtacctcacgcaggatcgcctcgcggaccaccagcgcgtcatattcgcggacgaaggttttgaccgccagacggcgggcgggcggggtggcgatgatcgacagatcgcgcataccgctcatcgccatattcagcgtacgcggaataggcgtggcggtcagggtcaggatatcgacgtcggcgcgcatcgccttgatgcgctctttatggcgcacgccgaagcggtgctcttcatcaacaatcagcaggccgagatcgcgcagcttaacgtccggctgcagcagtttatgggtgccgataagaatatcgactttcccttccgcgacctgctcgaggatctgcgcctgctctttggcgctacgaaagcgcgagagcatctcgatgcgcaccggccagttggcgaagcgatcgcgaaagttatcgaagtgctgctgggcgagcagggtggtcggcaccagcaccgccacctgcttatggttttcaaccgccagaaacgcggcgcgcatcgccacttccgttttgccgaagccgacatcgccgcacaccagacggtccatcgccagcggctgacacatatcgcttagtacggcgttaatagcctgcgcctgatcgggcgtggtctcgaacgggaagccgtcgcagaacagttgatattgctctttatcatgtttaaacgcgtagcccgctttcgccgcacgctgagcgtagatatccagcagttcggcggccacgtcgcgcactttctcggccgctttctgccgcgcccgcgcccagacgtcgccgcccagtttatgcagcggcgcattctcttccgcgccgcccgcatagcggctaatcagatgcagcgacgacaccggcacgtacagtttggcatcgttggcgtaggtcagcatcaggtattcgccgttgatgccgcccgcttcaagggtggtcattccggcgtagcgcccaactccatgctcaagatgcaccaccggttggccgatatgcagctccgccaggttacgaatcaacgtatcgggattgatggtgcggcgagagtcctgacgacggcgcgcgacgcgctcgcccagcaggtcgctttcgcaaatcagcgccagattacgctggctatcgacgaaaccatgctcggcggcgccgatcatcagatagcggccattacccgtcgcctcttcaagacgcaggatatgctttggcgcgatcttaatacgcgccagcatttcgccaagcgcctctcgacgcccctcgctctcgaccgaaaaaatcaccggcccgctgaaggactcgaggaatcggcgcaggttatccagcggcgctttgttctgcgcctggatcgccagctcgggtaatttctgataaccgagattggtgttggcggctttttccgccagacgctcggttttgagctggacgcgcggccattttttgagctcgctaaacagctcatcgctgcgcagccacagctgttccggcggcaaaagcgggcgcatcgggtcgacgccgcggttttcaaagcgggcgcgggtttcgttctggaagcgttcggcgctggcctccagatcgccggtattaacgatcagcgttttcgccgggaaatagctgaacagcggcggcagcggctcgttaaagaacagcggctgccagtattcgattcccgcgggcagcgtgcctttactgacctgctgataaatatgctcggcgtcgcgtttgacctcaaagcggtcgcgccactggctgcggaatagctcgatagcggcctgatccgtcgggaattcgtgcgccggaagcaggttaatgctggcgacttcctccagcgtacgctggctgtcgacgtcgaacagacgcaggctgtctatctcatcatcaaaaaaatcgagacggtagggctgctcgctgcccataggaaacaggtcaagcaatgcgccacgcgtggcgtactcgccgtgctccatcacctggtcgacgtgacgatagccggcgctatccagctgggagcgcagcgcatcccgcgacaggcgctggccttttttcatcaccagcgcgtggccgtggaggaaattatgcggacagacgcgctgcatcagggtgctgaccgggataattagtacgccgcgttccatggtcgggagctggtacagggtggcgagacgggaagagataatgtcctggtgcggggaaaagctatcgtaggggagggtttcccaatccgccaggcccgccaccatgctatcggtaaactgcctgatttcatcattcagacgcagggcgttttgcatatcgggggcaatcagtaccaccgggccgccgtggcgctcggccatttccgccaccagagtggcgcaggccgcgccggtcagttcgccaatctggcgctgatcgccggctttaaccggcagagagtatcggtattgttcaggcatagacggtatcatgatctcttgggtattcgctctgccgatatggagggcaactcgctgatattcaatagtgagattatccgcgatcgacccggattcgccaacccgtatcgcaaacatcctgtcgtggccaaaaatgtaacgaactccgataagcgtaaagttaaataatgacttacctgtctatcttgttgtttatattgatgttttgctatttttgtcaataaaatctacaggtatcagtcatttacgctgcccataatcgcttatatactcgggcatcggctatcagcaatcagatggattacatgtatcaacctgccgcactctttatcggccttcgctatatgcgtgggcgcgcagccgaccgcttcggtcgtttcgtctcctggctttcgaccatcggcattacgcttggcgtgatggcgctggtgaccgttctttcggtgatgaacggctttgaacgcgagctgcaaaacaacatcctggggctgatgccgcaggccattcttagcgccaagcaggggtctgtaaacccgcaacagctgccggaaagcgcggccagattacagggggtcacccgcgtggcgccgctgaccaccggcgatgttgtactgcaaagcgcccgcagcgtggcggtcggcgtgatgctcggcatcgacccggcgcaaaaagatcccctgacgccctacctggttaacgtcaagcagagcgatctgcaggccggcaagtataacgtcatcctgggcgagcagctggcaggacagctgggcgtcaatcgcggcgatcaaatccgcgtgatggtgccttccgccagccagtttaccccgatggggcggcttcccagccagcgcctgtttaacgtaatcggtacctttgccgccagcagtgaagtcgatggttatcaaatgttgaccaacatcgacgacgcctcgcgcctgatgcgctacccgcagggaaatattaccggctggcggctgtggctgaatcagcctttacaggtggatactctcagccagcagacgctgccggaagggaccaaatggcaggactggcgcgagcgtaaaggcgagctgttccaggccgtgcggatggaaaaaaatatgatgggcctgctgctgagcctgatcgtcgccgtcgccgcttttaacatcattacctctctgggaatgatggtgatggaaaaacagggcgaggtggcgattctccagaccctcggcctgacgccgcggcagatcatgctggtctttatggttcagggggccagcgccgggatcgtcggcgcgctgcttggcgccgggctgggcgcgctgctggccagccagctgaataatttgatgccgattatcggcgcgttcctcgacggcgccgcgctgccggtggccattgagccgctgcaggtcattgtgattgccctggtggcaatggtgctggcattactctctacgttgtatccttcatggcgcgctgccgccactcaacccgctgaggctttacgttatgaataagatcctgctgcaatgcgacaacctgtgcaaacgctatcaggaaggcaccgtgcaaaccgacgtgttgcatgatgtcagcttcagcattgaggagggtgagatgatggcgattgtcggtacctccggttccggcaaaagtacgctgctgcatctgcttggcgggctggatacgccgacctccggcgacgttatcttttccggccagccgatgagccagctctccgccgccgcccgcgccgatctgcgcaaccgcgaactgggctttatctatcagtttcaccacctcttaccggatttcaccgcgctggaaaacgtggcgatgccgctgctgattggtaagcagaaggcggcggatatcgagcggcaggcgaaagcgatgctgcgcgccgtcgggcttgagcaccgcagcgaccaccgtccgtcggagctctccggcggcgagcgtcagcgcgttgcgattgcccgtgcgctggtcaataaaccgcgcctggtgctggcggacgagcccaccggtaaccttgacgcccgcaacgccgacagcatttttcagctgcttggcgagctgaacgtggcgcagcgtaccgccttcctggtggtgacccacgacctgcagctggcaaaacgcatgagccgccagctggagatgcgcgacgggcgcctgacagccgaactctccctgatgggggctgagtaatggcttctccgttatcgttattgattgccctgcgcttcagccgtggacggcggcgcggtgggatggtgtcgctgatttcggttatttcgacgatcggtatcgcgctgggcgtggcggtgttgatcgttggcctgagcgcgatgaacggcttcgaacgcgagctcaacaaccgcattctggcggtggtcccgcacggtgagattgaaccggtgaaccagccgtggaacaactggaacgaggcgctggcgaaggttgagaaggtcaaaggcatcgttgccgcggcgccatatattaacttcaccgggctggtggagagcggcagcaatatgcgcgccatccaggtgaaaggcgttgacccgcagcaggagagccgtctcagttcgctgcccaactttgtgcagaacaatgcgtgggccagctttaaagccggcgaacagcaggtgatcctcggtaaaggcgtcgccgatgccctgcacgttaagcagggggactgggtgtcaattatgatccctaactccgatgccgagcatcagctgctgcagccaaagcgcgtcaggcttcacgtcgccggtattttgcagctcagcggtcagctcgatcatagttttgccatgattcccatgcaggatgcgcagcagtaccttgatatgggcagcagcgtgacggggatcgccatcaaagtgaccgatgtgtttcatgccaacaccctggtacgcgatgcgggccaggtgaccaatagctacgtttatatcaagagctggataggcacctacggctatatgtaccgggacattcagatgatccgcgccattatgtacctggcgatggtgctggtgattggcgtggcctgctttaacatcgtctcgaccctggtgatggcggtgaaagataaaagcggcgatattgcggtgctgcgcacgcttggcgcaaaagacgggctgatccgcgcgattttcgtatggtatggtttacttgccggttcggtagggagcctgattggggtggcgattggcgttatctgcgcctttaagctgaccgcaatcattaacggtattgagaacctgatcgggcataaattcctctccggcgacatctattttattgacttcctgccgtctgaactgcactggctggacgtcgtttacgtgctggtgacggcactgttgctgagtttgctggccagctggtatcccgcccgccgcgccagccgcattgacccggcgagggtgctgagtggccagtaatttatcgtcatggtcggctttgctgaccagtaaagaggaattgctgaaatgtactatggatttgacattggcggcagcaagatagcgctgggcgtatttgataaatcgcggcggctgcagtgggaaaaacgcgtcgccacgccgaaagagagctacgaagcatttttgcaggcggtagaggagctggttgaagaagccgaccagcgcttcggctgccagggctcggtgggcatcggtattccgggcatgccggagacggaagacggcacgctctacgccgccaacgtgcccgccgccagcggcaggcggctgcgggccgatctgagcgaacgtctgggccgcgatgtgcggcttgataacgacgccaactgttttgccctctccgaagcgtgggatgacgagttcacccaatatccgctggtgatggggatgatcctcggcaccggggttggcggggggctggtgctcaacggaaaatcgattaccgggcatcgctatattaccggcgaattcggccatatccgcctgccggtggatgcgctggaggtggtggggcgcgattttccgcttacgcgctgcggctgcggccagctgggctgcattgaaaactacctttccggacgcggcttcgcctggctgtatgaacatttttaccaacacgctttaacctcgcccgagatcgtcgcgctatggcagcagggcgacgcgaaggcgcgcgagcacgtcgagcgctatctcgatttactggcggtatgcctgggcaatattttaacgattgtcgacccggatctgctggtgcttggcggtggattgtctaactttacagcaataaccgaagggctggcgcagcgcctgccgcgacatctgcttcccgttgccggcgtgccgcgcattgagcgcgcgcgccatggcgatgccggaggcatgcgcggtgcggccttccttcatctgactcaataacgacagaggtagctatgcagtcgcgccgcttacatcgattaagccgatttcgccgcaataagcgtcggttacgagaccgtctgcgtcagcggattttcttcggcgaagataaggagacccctgaaacgatggaaaaaccaagagtcgtggtgctaaccggcgcgggtatttcggcagagtcgggaattaaaaccttccgcgccgccgatggcctgtgggaagagcatagggtggaagacgtggcgacgccggaaggcttcgcccgcgatccggcgctggtgcaggcgttttacaatgaccgccgccgccagctgcaaggaccggacatcgtgcccaacgcggcgcatcaggcgctggcgcggctggaagaggcgctgggcgatcgttttctgctggtcacccagaatatcgataatctgcacgagcgcgcgggcaatcgccgggtgattcatatgcacggcgagctgctgaaggtgcgctgctcgtggagcggccaggtgctggcgtggaccggcgatgtgacgacggaggacaaatgccactgctgccagttccccgcgccgctgcgcccgcacgtggtgtggttcggcgagatgccgctggatatggatgagatctaccttgcgctggccgagtgcgatatctttatcgccatcggcacttccgggcacgtttatccggcggcaggctttgttcacgaagcgcggctgcagggcgcccatacggtagagctcaacctcgagccaagccaggtgggcagcgaatttgccgaaaaacactatggcctggcaagcgaagtggtaccgtgctttgtggaaaagctgcttaaacagctggcaggataaacgcaacctcatcactacagcgttacggaaaacaggagtggctatggatagcccattagcaatatctgtcgcgataattttggccgcagtaggggcggttcggcgaggttcggcccgcttatcgtgctgagcgcgttgtggaagccgctgaattatgttgcgggaaagcttgctgctgtcttaacgaaaaccaggacaagaaataatccacgcttttgccaccgcccgagaaaaagcgtacgacaatcgccagggcaggtcgctcatgaaattcaggacgccgcggcgccctttattcatagcgccttctgcatattaatcaccgcccgggcattggatgcgctggtggccagcacgtcaatcacgccggtgcgcagcgcgccgagaatcgccgttgccttggtgctttccgaagcaatggcgatcacgcacgggatggcgcggagctgttcaaggctcaggccgataacccgatcgttcatcaccgtatcaaccggtttaccctggatattgaaaaaactatagccggcgagatcgcccactacgccctgttcctggcgcgcggtcgcaatctcctgtggggagaaccagccgagctgcaccataaagctattttcattcatatcgccaaggccaatgatggcgacatccgccttgctggcctgttcgagcgtggctttaatcagccggttttgcataaacgccgagcgcagttccggcgtttcgacataggccggggcgtacagcgtttcgctaaaaccgttgaatttacgcgccaggtttcgactgatgtgatcggcatcgatcagctggttgtcgcgcttggtgccgccgataccgcaaataaagcgacagttgcgctccggaaaaatccccacgtggttggccacggcggcgacgttgcgaccctgcccgacggtcaccgtcatatcgcttttgaggatcccggcgagatagttgctgaccagcgccgcgacctgctggcgctgttcatcctcgtcgtgatggtccagggcgataagcgcgcgcttgatgccgaaatgggagataaactgctgctcaatctgggagctgaagaccgggtggtatttcacgctgatctcgacaattccttcgtggcgagcttttttcagcagccgaccgaccttaatgcgtgagatcccaaagcgttttgcaatctcttcctgggtttgctcctgatcgtaataggccacggcaatttctgtcagcagcgcataatctgagtcttgttcagtcatagttatcgcctggtgtttccatctttgatgtctccctaatactactgcgcctgaagaataaattcctctgtaacgcgttgaacaatgtcgcaatagccgttggcatcccatgccgcgcggccaataaacagtccgttaatgtcatcctgctgaaggagttctacggcattttgccgattgacgctaccgccgtacagcaggggaacgcgccgtccgatttcttcgctgaaggtctcgcataacgcctgacgcagcgcccggtggatctctgcggcctgctccggcgtcgccggcgtgccgtgttcgccgatagcccatatgggctcataggcaaccagagtgtgtaaaacctgctgttcattcaggccataaagcgcgattttcatctgccgcactaccgtttcccgtgagacctgccagcgtttttcatcggcgctgtcgccgatacagatcagaggccgaaggccatgacgcagggcgcgatgtactttttggttaatggcggcgtcggattcattgaacgcgccgcgacgctcggagtgaccaagctcgaccagggcggcgccggtttcagccagcatggcggcggatatttcaccggtccaggcgccgttttccgcttcatgcatattctgcgcgccggtcaggcaggggatctgatgctgctgtagatactggctgacgggataaatggcggtgaaagggggaataataaacggctggattttcggatgcctcacctgcggtaaccgctgcgccagcgtttcacaaaaggccatggcttgcgataacggtttgttcattttccagctggttcctaaccagatttgttccattttgttctccgtaataggtaaatcaatagcttgtcgtgaaatggctttcgcttatgagtgagattgaactttttatcacccaatgaacatatgttagatcacatttttttataaaataaatctatggatttttttatgtgatctaaatcaccaataacctctcaatcatcaggtaatgttttgaccatatgattcactattgaacatatgaacaaaccgattttcactacgagaggtccacgatgtcacaagagaaaaagcccgttgtcgcacttaccattggcgatcctgccgggattggtccggagatttcagtcgcgacgatgatggagaaaagcgtctacgacgagtgcaaaccttttttgattggctcagcgccgattatcgccagagcaatgaaaatcatgggctgtgattttccgattaacaaaattagccatccgcaggaagctcgcttcagctggggtacgctggacgtgctggaaaccgatgattatgactgcgagagcattgaatggggcaaagtgcagaagctggcggggcagatgtcgctggactatgttctgaaatctatcgaactggggaaagccggcctgatcgatgtggtctctaccgcgccgattcataaagaagcaatcaagctggcggggtgtaaactgccgggtcataccgagatctatcaggttgaaacgcaatccgattatggcctgaccatgttccacgttcataacctgcgggtcttcttcgtgagccgtcatatggcgcttaaagacgcctgcgattacgccaataaagagcgcgttctggcctgcgtgcagcagatccaccatgagttcaccgcgctaaatatcaaaaatccgcgcattgcggtagccgcgctgaatccgcatggttcagacaacggcctgtttggccacgaagaagccgataacctcatcccggcagtcaaagcggcgcaggaaatggggattaacgccatcggcccggtgccggcagattccgtcttccatctgggtaaacaggggcgctatgacgccatcctctcgctttaccacgatcaggggcatatcgcctgtaaaaccctcgattttgagcgttccgtgaccattacctttggcctgccgtttatgcgtagctcggtagaccacggcacggcgtttgatattgccggcaccggtaaagcgggcaccgtcagtatgctggagtccacgatggccgcggtgagctactggaaaatgaaaaaccactaatcgctgaggttaatgcgaagcaaaagggcagagaaatggaaaaacatctgttaattagcaaaggctgtaagggctggggcgggccgctgaccattaatattagccaggcgaaaaagattgcttatatcaccggggggatttgtcccccggttgttgagcgcctgagcgaactgaccggctggccttccgtcgacgtatttaaaaatggcgagccgccggaagaggagatcggcctgatggttatcgactgcggcggcacgctacgctgcggtctctatcccaaacgcggtattccgacgattaacctccatcccaccggtaaaagtggcccgctggcggagtttattcatgaaggaatctacgtctccggcgtgacgcccgcctgtattgaaatgatctggccgcagggggaaggcggtaagctggggatcgtggccgacgatctgaccggtgcgaccaccgtcggggtgctgctggcgcgtagcgggttaaaaaccgccgcgttcttcgatactgaatccttcgcccgcaatgaggtggagtatccggcgatggtcgtcagcagcgacagccgtcctttgccgaaagcggaagcccagcagcaggtcagcgccgcggtgaagcagctgcaggcgcgcggcgcgcactactttaccaagcgtattgataccacgctgcgcggcggtatcggctttgaaattgacgccatgctggaacaattgccgctggaaacggttgccgtcgtcgtgccggcgatgccgcagtcgcggcgtattctggttggcggctattcggtaattgactccgtcgcgctttcgcgaaccgatgtcgcacgcgatgtacgtaccccggttaccgaatcctgggtgccgggattgctggcggcgcagacccatcatcaggtcggacatatcgcgctggcctcggtgatgaaaggcgaggggcaactgcagcgggatctccaggaacagcagcagcgcggcgtgcgggtgatcgtcgttgatgcgattaccgttgacgatgtcgatgcgattgccggggcggtggtggcgctgaactggaacgtgctggcggtcgacccggggccttttaccgagcggcttgcggtccgtcgtggcctgatgcgggaagcgcgcagcagcgcgacagcgtcgtcaggggcggaaaacccgcgcggttcgattctggtggttgccggtagcgccacgccggtgactaaaaagcagcttcagcatctgatcgctaatgacgaaagagtatgtcacattcctgttgatgccgaactgctggttgacaggaaaaacgccgctgaaatcgaagtgaatcgcgtggtgcagcatgcccggcagtgcgtgccggcacagcagaacgccatcttcgtttttgaatccgcgttaaccgggcggctgctgaatcttcaggaagaagagcagcgctttgggctggcccacggacaggctgcggaaaatattaaccagggactggggaatattgttcgtgacgtgcttaactgcgcagccggagaaattaaaggcctgtatatgaccggtggcgatacgatggtgaatgttcttaaagagctcggcgctaccgggattgaaatgattgactacgtgataccgcaaaccgatatggtgcgtattatcggcggcgattatgcgggattgatttgcgtcggtaaaggcggtttaaccggaccagaagatattattagtactattgttgaaagaatttataaagaagcgcagctataacccaccggtcatataaataaaaaacgacgtaatggtcgtccgggtagtattgcgtcgttatctctgttaaatcataatttatgagttaccctatgaacataaatatattagagaagatgaataaggtgccaggcggtttaattattattccgttgctcgcggcgattcttattaatacctttgcgccggaagtcctgggcatcggcggcccgacgaccgcattattcaaggttggttccagcgcaatgatggggatttttctgctaatttgcggtacctcgatcaatatccgccaggccggcttgccgctctataaaggcgcggtgctgctgttcctgaaatgcctcgccggcgcgctggccgtatgggtggccggagcgatgtttggccccaacggtttcctcggtatttcgaccctggcgctgattgcctgcttaaccagctccaacagctcgctatatatcgcgctgtgcagcaactacggcgatgccagcgacgccggggcgatctccgtcttctgcgtcaaggatgggccctttgttaccatgatggtgctgggggtcagcggcctggccaatattcctttcgccgcgctgctatcgatgctgatcccgctgctgattggtatgctatggggcaaccttgatgatcgtttcaaacagctgtgcgccgccgctcagccgctgattatcattattatgtcgtttgccatcggcgccaattccagcattaacacggtctttaccgccggactgtccgggatcctgcttggcattatctctgcgctaaccggcattgtgttctattttatctacaacctgttcctgaagaagaaaaccgcgctgggcgccgcgctggggacaaccgccgccagctctgcgctgacgccggcaatggtggctcaggccgacccctcgctggcgatgtacgtggatgccgcgaccgcgcagctggcgacggcgagcatcatcaccatgattaccgcgccgatactggtggcctggtttgataaacgtctgaaaaagcgcgcgccgagggttgaaccagtaaaagaagaaaccagtgaagagaaagtgacattatcttcgcctgccaccaaagggaacaaataatatgatcgcgccgttgtattcattacttatcacggctgtcggggaatatgtcaaaaactctctacaggagcatcagctgattttattttctgaatccgttcctgacgatattgcgatgtattgcgccgtacatcagagcagtgagctgacagctgaattgtcacccgggcagataatgaaaataaatgagactatttatcgagtcacggcggtaggtagcgttgcaacggcaaatttaaaacggcttggccatatcactttaaaatttgatggcgctgccaccgctgaattaccggggatggtgcatctcaatggtgacgtcccccaggatattcagcgcggcgaccaaatctttttttatccggaactaaattaagacgtacagctaaattaaggaaattatcatgaaaacaatcgctattggtgcggatgatgccgcctatgcttttcgcgacgctatcgtcgcttatctgaatgggcagggaattaaggtcgcggattacagcagcgataaacgccagggcagcatggtctatccggatgttgcccacgcggtggcaatgtcaataaagcagggcgagcacgatcgcggcatcctgatttgcggcacaggcattggaatgagcattgtggcaaataaagtgccgggggtacgagccgcccagtgccacgatactttctccgccgagcgggcgcgcaaaagtaataacgcgcagattatcactcttggcgcgcgcgtgattggcccggagttgggcaaaaaaattattcaggcctggcttgaatccgaatatgaaggcggcggctccgcgtcgaaagtggagcgtatcgactattacgaacaccagcacgccagagattaatatccgcagtcgtaatataaggaacagactatgagccagttagacgaactgaaaaaatacaccacggtggttgccgacaccggcgatatcgaatcgattaaaaaatttgccccgcaggatgcgaccaccaacccttcactggtgctgaaggccgcgcagctcccgcagtatcaggcgctgattgccgacgcaatcggcaaggcgcgtcggcagggcggcagcccggaaacgcagctgataaacgcctgcgatcaggtggcggtggatatcggtaccgaggtactgcgtcatgtgccggggcgtatttctaccgaagtcgatgcccgttttgcctgggatcgcgggatgtgcgtgtcgaaggcgcgcaagcttattcagatgtatgaaaagaacggcatcgggccggaacgcatccttatcaaacttgccgccacctgggaggggattcgcgccgcagaggagctggaacaaagcggtatcaactgtaacctgaccctgctgttctcctttgcccaggcgcgggcctgcgccgaagcgggcgtctttttaatctcgccgttcgtggggcgtatttacgactggtatcagaaaaaccaaccgcagtcggagtatcaggtcgacagcgatccgggcgtggtttccgtgcgccagatttatcagtactacaaatcgcacggctacgacaccgtggtgatgggggccagcttccgccgtatcgagcagatccaggcgctggcgggctgcgatcgcctgactatctccccggcgctgcttgatgaactggccgccagcgaaggcgcgctgagtcgccagctggcgcccggctgcgtgacggaaacccgccccagcccgatgactcaggcggagttcctctggcagcatcatcaggatccgatggcggtggaaaaactggcggaaggtatccgcctgttcgcggtcgatcaggtcaaactggaaaatcagattcagcagatgctgtaagggcaggaaaagagacttatgaataccacaaaaaccacccgcagcctgtgcgccaacgcgctgcgagcgctgagcatggacgcagtacagaaagccaaatccggtcacccgggtgccccgatgggtatggctgacattgccgaagtcctgtggcgtgatttcctgaatcataacccgcagaacccgtcatgggccgaccgcgaccgttttgtcctgtccaacggccacggttccatgctgatttacagcctgctgcacctcaccggttatgatctgccgattgaagagctgaagaacttccgtcagctgcactctaaaacgccgggtcacccggaagtcagctacaccgcgggcgtggaaaccaccaccggtccgctggggcagggtattgcgaatgcggttggtatggccatcgcggagaaaactctggcggcgcagttcaaccgcccgggccacgacattgttgaccacttcacctacgcgttcatgggcgacggctgcatgatggaaggtatctctcacgaggtatgttctctggccggtaccctgaaactgggcaagctggtggcgttctatgacgacaacggcatctccatcgacggtcacgtcgaaggctggttcaccgatgacaccgcgaagcgttttgaagcctacggctggcacgtggtgcgcggcgttgacggtcacgatgctgactcgattaaacgcgcggtagaggaagcgcgtgcggttaccgacaaaccgtccctgctgatgtgcaaaaccatcatcggtttcggttcgccgaacaaagccggtacccacgactcccacggcgcgccgctgggcgacgcggaaatcgcgctgacccgcgaagcgctcggctggaaacacccggcgtttgaaatcccgtctgaaatctatgcccagtgggatgccaaagaagccggccaggcgaaagagtccgcgtggaacgagaaattcgccgcctacgccagagccttcccgcaggaagctgccgagtttacccgccgtatgaaaggcgagatgccggctgatttcgacgcgaaagcgaacgaattcatcgcgaagctgcaggctaacccggcgaaaatcgccagccgtaaagcgtcccagaacgccattgaagccttcggcccgctgctgcctgagttcctcggcggctccgctgacctggcgccaagtaacctgaccctgtggtccggttctaaagcgatcaacgaagacgctgccggtaactatatccactacggcgtgcgcgaattcggtatgaccgcgattgccaacggtatcgccctgcacggcggtttcctgccgtacacctccaccttcctgatgttcgtcgagtacgcgcgtaacgcggtacgtatggcggcgctgatgaagcagcgtcaggtgatggtctacacccacgactccatcggtctgggcgaagacggcccgacgcaccagccggttgagcaggtggcttccctgcgcgtcactccgaacatgtccacatggcgtccgtgcgaccaggtggaatccgccatcgcgtggaaatacggcgtggagcgtcaggacggcccgaccgcgctgatcctctcccgtcagaacctggcgcagcaggagcgtaccgaagagcagctggcgaacgtcgcccgcggcggctacgtgctgaaagactgcgcgggacagccggagctgatcttcatcgccaccggttctgaagtggagctggcggttgccgcttacgaaaaactgactgccgaaggcgtgaaggcgcgcgtggtttccatgccgtccaccgacgcgttcgacaggcaggatgccgcttaccgtgaagccgtgctgccgaaagccgtctctgcgcgcgtggccatcgaagcgggtatcgccgactactggttcaaatacgtgggcctgaacggcgcgatcgttggcatgaccaccttcggtgagtctgcgccggcggagcagctgtttgaagagtttggcttcaccgtggacaacgtggtcgcgaaagcgaaagcgctgctgtagtcctttcccccttcccgggggcggcgcggtaaagccgcgccttgcccgggctacggggccagcgcggtcgggtagtccggaccggtgcgcggcaccgccagcgggaaaagaatctggcttcaccgtagacaacgcggttgccagagtaaaagcactgttgttattttcgaccgttaaaatccggcccctcatcgctgtctggtgggagggccgttataatgttgattgtctatttcacatatatgtaacgttgtgattaacaaaacagtatcagacagacatttgtggcatgtttcttcactcggacaacagagaaggaataacaccatggccactgaatatgttgactacctgatcctcggcgacgagcatcacggcgaaatccacagggatattaaaagccactctctccgggtccgttcgaaatacgccgcctgttccgtccggggagatacctctgccgagcagccaaaaatggtgaactacaatgtccatgaatatccggcgcaggatgggcgattttatctggtggcgaccaactacccgctggccgattttgacgttgaagacgcgctggttaaatcaagaattcatccgttgagaagctagaaacgcacttcctgaagcggtcgggtaagcaccatgctacccgacctgtgaggtgattaacgacccgctttcagcttctgataatactcttcataaagcgtactggcgctgccgacatcgttctgccattcgcctttctgaatcgttgcggcgtccgggtagagcgatttatcgttggcgatttccgggcttagcatcttccgcgcggcaaggtttggcgtcgggtagccgatagtttccgctacctgtttggccacttccgggcgcagcaggaagttgatcagcttcagcgcgccatcgacgtttttggcgtttgccggaatcgacaggctatccatccagaagatgccgccttctttcggccacaccacttccagcggcgtaccggcctgacgcgcaacccacgcggagccgttccataccatgccgaggttgacctcgccttccatatacgggttcgccgggttatcggagttgaacgccgcgacgttcggcatcagttttttcagctcgttataggccgcttcaatctctttcggatcggtggtattaccggagtagcccagtttacgcagcgcgacctggaacacttcgcgcgcgtcgtcggtcagcagcaggctgctcttatactcgggtttccacagatccgcccagctggtgacggtcttcggatcgatctcttcgctattcaccccaatggccgtcgcgccccagatgtacggaatggagtagtcgttgttggggtcgaacggtttgttgagcatttcagggtcaagattgctgaagttgctcagtttgctcttgtcgatcttctgcagcatgccctctttacgcattttgtcgacgaagtaggtggaaggcacgaccaggtcgtaggcgccgtctttataggttttgagcttggcgtacatggtttcgttcgactcgtaggtcgaatagatcaccttgatgccggtctctttggtgaactgctccagcagccccggcgggacatactcggtccagttgtagaaatagagcgttttgctatcgtccgcgtgcgcggcgctcataccgactgccagagcgcccgcagcgagcaggtggcgtgaccattttttcattttaacgtcccctgagttttatcacgtgcaattatctggctggcaataaccatcaccagcgacagaaccaacagaatggtcgccagcgcattaacctccggcgataccccaactttaaccatcgaatagatcttcagcggcaggatctcataacccggcccggtgacgaatgaagagaccaccacatcatccatcgacagggtaaagctcagcagccaccctgcggccaccgcgggcagcgccagcggcaaaatgatctttcgcagaatggtcagttcgctggcgccgagatctttcgctgcttccagcatccgcacgtcaaaacctttcaggcgcgaaaataccgtgaccaccacgaagggcaggcaaaaggtgatgtgggaaaacagcagcgaccagaatcccagctgaataccgatcagcataaacagcaccagcagcgaaatcgccatcacgatatccggcgacatcatcaccacgaacagcatcccgctgacgaacggcttgccgcgaaagcgatagcggtacagcgccacggcggtcagcgagccgataagcgtagcaaaggtcgccgagagcaccgccatggtcagcgagtgctgcgccgcctgcagcaggctgtcgttattcatcagcaggctataccagttggtggtaaaaccctgccagttaatgccaaagcgtgaactgttaaacgagttaacgatcagaataataatgggaatatagagatacgcgtaaatagcggtcataaagccgccgcgcagcagtcgaccgatcattccagttccacctttttattcagtaaacgcgccgcgcgccagtaaatcagcagcatcaggcccatcaccagcgtaagcgtgatgctggtcgccgcgccaaacggccagtcgcggatgttgaggaactggctcttaatcacgttaccaatcagcaggttcttcgcgccgcccatcaggtcggaaacgtagaacagccccatagccggaagcatcaccagcaggcagccggcgataatccccggcatggtcagcggaatgatgatacggataaaggtttgtagcttaccggcgccaaggtcttttgccgcttccagcagcgggcggtcgagcttctcgatgctcgagtagagcggcatcaccataaacggcagcagaatatagaccaggccgataatcaccgccgagggggtgtacatgatgcgcagcggcgtatcgatgatacccagccacagcaaaaattcattaaggtagcccttggtgctgaggaaaatcttcaggccgtagatacgaatcagcgaattggtccagaacggcacgatcagcagaaacagcatcagcgggcgcaccttttccggtagcctggccaggaaccaggcgaaagggtagccgagcgccaggcaggccagcgtcgccagcagcgccatattcaacgaatgcagcagcacgtcgtagtagagcgggtcgagcaggcgcgcgtagttgtccagcgtaaagaccagcttgacgaagttggtgtcgtcgcgggtcagaaagctggtggcgatgatcatcaggttgggcagaaagacaaacagcacaagccagcccacgatggtggcgatcgcaacattctggaatttactggtgttcttcatcggccagcacaacctcccagctttctacccagttaatggccattttctggtcgagcgagtggtcaaaatcagggtcgtcttcattaaagaattcgctgaccatcaccattttaccgttttccagttcaaccaccgattccagcgtcatgcctttatagttgcgttcgcggatatagcctatcaggccatcggcgtcattactgtcgtggatctcgtccacgcgcaggtcttccgggcgcagcagaacgttaagccgctggcctttttcaacggcgaagttgacgtagatattgcactcgcggccttcgacgctggcgcgcacccgccgatcgtcaatccgttcaatgaccgtggcgctgaaaatgttgatttcgccgataaagctggcgacgaacaggtttttcggttcttcgtagatttcgcgcggcgtaccgtcctgctcgattttaccctcgcgcatcaccacgatacggtcggacatggtcagcgcttcttcctgatcgtgggtcacgaagacgaaggtgatgccgagcttacgctgcagcgccttcagttcgttttgcatctgcttgcgcagtttataatcaagggcggagagggattcatcaagcagcagcaggcgcggtttgttcaccaccgcgcgggcaatcgccacgcgctgctgctggccaccagacagctgatgcggtttacgttgagcaaacgcttcaagctgcaccatgcgcagggcatcgtggacgcggggcgcgatgtccgccgtcggggttttctgcatacgcaggccgaaggcgacgttttcaaacaccgtcatgtgcggaaacagcgcatagctttgaaagacggtgttcacgtggcggttttccgccgggatatgggtgatatcgtgatcttcgagatggatttggccgctatcgacgctttccagtccggcgataagacgaagaacggttgttttaccgcagccagaggggccaagcagggtgagaaactcaccgttgttgatggtcagattgaggtcggagataaccgttttaccatcaaagcttttgcgaattcccgccagctgaaccagcggagaacgcgaacgcggttgtgtattcaattttcgactctgtcccatgtagacgcagcggaaagcttaccgatgcggggtttgtggttaaccacctttggttttgcacataaaataataaggccgagcattctacggcaaacgattgtaatcgccaatgattgatgcgccatgatgaactacctttacaacattatcgtgtgaaatgtattaaattctcatttgccgggctaaaaatgacctgacgcaatatttggtttttccggcttatcaataatgttgtcacaaaagaagagggtggctacatggataaattgcttgagcgttttttgcagtacgtttctttagacacgcagtcgaaaccgggcgtgcgtcaggtaccgagcacggaaggtcagtggaagctgctacgtctgcttcaggcgcagctgcaagaaatgggactggtgaatgtaacgctgagtgagaaagggacgatcatgggcaccctgccagctaacgttgagggtgatattccggccattggctttatttctcatgtcgatacgtcgcctgacttcagcggcaagaacgtgaatccgcagatcgtagaaaactatcgcggcggcgatatcgcgcttggtattggcgatgaggtcctctcgccggtgatgttcccgatactgcaccagctgctcgggcagacgctgatcaccaccgatggtaaaacgctcctcggcgccgatgataaagccggtatcgcagagatcatgaccgcgctggcgacgctaaaggcgaagaatattcctcacggcgatattcgcgtggcctttaccccagatgaagaggtgggcaaaggggcgaagcatttcgatgttgccgcgtttgacgcctgctgggcctataccgtcgacggtggcggcgtgggtgagctggagtttgagaactttaacgccgcgtcggtgacgattaagatcgttggcaacaatgttcatcccggtacggcgaaaggggtgatggtcaacgcgctgtcgctggcggcgcgcattcatgccgaagtcccagcggacgaagcgccggaaaccaccgaaggctatgagggcttctaccatctggccagcatcaaaggcacggtcgatcgggccgatatgcactacatcatccgcgattttgaccgcaagcagtttgaggcccgcaagcgcaaaatgatggagatcgccaaaaaggtcggcaaggggctgcatccggattgctatattgagctggtcatcgaagacagctattacaatatgcatgaaaaggtgatggcgcacccgcacgtggtggagattgcccgccaggcgatggtggattgccagatcgatccgcagatgaagccgattcgcggcggtaccgacggcgcgcagctctccttcatgggtctgccgtgcccgaatctgtttaccggcggctataactaccacggcaagcatgagtttgtgacgcttgaaggcatggagaaggcggtgcaggtgattgtacgcattgcggagctgacggcgaaacgaggcgcatgaaggctataagctacgggcccggtgaggcgtcagccgtcaccgggcagtcgaagactcagtcctcaaagaaccagtagccgctgttgaccagcgcggccagcagggcgaggaaggagggatcttccagcgcatcgccgagatgctcagcgtttagcgtcaggtgggttgccagagcatccagcgccggacggtgcggagagttgatcttctcgccgttgacgaatacctcgccatcaatccgcagcacgcgcaggcccccaagacgcgtcagcttatctccctgctgcagggcatcgtaaatttcatccggctgatacggtggctccggcggcgccacgtccagctcgtgccgggactgggtgataaattcgccgaaccactgcttaaagtgctccggctgattaatcagccccagcatcatatcgcgcaggcgatccagctccgcgggcagaatatccgcagggtgctcgcgagacggtacgtccgggtcggcgtaacgctggctgcccagttcacgctgcaaaatataatcagcaaagccgctgaacagctcacgcgcgttaggcgcgcgatagccaactgaatagttgagcgagttttccagcgagtagccttcgtgcgggaaccccggcggaatatacagaatatcgcccggctccatctcttcatcaataatggcttcaaacgggtcgacctgcagcaggtccgggtgcgggcagtgctgtttcatcggcactttttcacccacgcgccagcggcggcggccggtaccctgaatgataaacacatcgtactggtcgagatgcggaccgacgccgccgccagggacggaaaacgagatcatcagatcgtcgatgcgccagtcgggcagggcgcggaacggatgcatgagcgccgccgttggctgatgccagttattgacggcctgtaccagcagcgaccagttattctcgctcaggtgatcgtagctctcaaaggggccgtggctgacctgccatttaccgtcctgatgactgaccaggcggctgtcgacttcgctctccatagccagtccggccagttcgtccgggcttaacggatcgacgaaattagcaaagccccgtttcagcaccaccgggcgtttttgccagtagcgttcgataaagtcgggccagttaagcgttaattgataatccatatttatattccacagcaggtgtctgttagggattataacggatgcggcaccagcatgatgcaggcgccgttaaaaaaccgactgttttagctctctttatcttccagggcctggcgaccaaaaataacttccatgcaggcgccgccgagcaggctctcttcggcgaggatgcggccatcgtactgggctacgatatcgcgggcaaccgagagaccgacgccctgtccggggcgcagcgtatctgcgcgctggccgcggtcgaacaccgcgctgcgcatcgcggcggggatccccgggccatcatcttcaaccagaatatgcagatggttgtcgttggtctgccggacggagacttccacaaactcaaggcagtatttacaggcgttatcgagcacattgcccataacctccataaaatcattcttttcaccgacaaaactgatttccggggagatatccagggtaatgttcacgcctttacgttgatagaccttattcagcgccgaggtcaggctgtcgaggagcggagcgatgggatgcagctcgcgactgagcagcgaaccgccgctgcgcatgctggcgcggtgcagatagtagccaatctgctgcgagatgcggctaatctgctccagcatcaccggctctgcttcattgacgctcattttctcgccgcgcatggaacgcagcgtgctctgcatcaccgcaagcggggttttcagactgtgggtgaggtcggtcagcgtcgtgcggtatttatcatagcgttcgcgttcgcttttcagcaggcggttgaggttgctgaccagccgcgtcagctcgcgggtggtattcggattgagcatctcacggtgatgctcctccagttcgcgcacctctttggccagcgattcgatagggcgcaagctccaccatgccgcgacccacagtagcgggatcaccagcagcaggttagccgcgaggacatagataaaccagctccacaccatgtaggagcgcttaagctctaccggaatggtgtcgacaaccacgatactgagctgcggcatggtgctggtggccggatagatattgatcgccaccgagtgggtcatttcggagccatcgtcctcttgccgaatggcgtccagctgttgctgaatctcatggttgttgtgctgcagcatactgctgctgtcaacgtcggcctcaatttcgtgaaagccgttgtttttgagccagtccggttgaatacgttttaccagccagggtacgtcgcgctgtgcccacagcagctggccgcgggcgtcgtaaatgagcgtcaccgtggggctttgcatattcaggttttcggggatatcaacatcgatggtgttgttttcccatttcgccagcatatagaacagattgctctcgccgcgcagcaggcggaaggtggttttatcgaaactgacgctataccccaccagcgcgaccatgccataggagagtgacaacaccagcactacggcggccgtcgccagcagaaagcgaacgcgtaacgacagcggcagaatatgccgcagcacccctttcatccgcgcagttcgaacagatagccctgaccgcgcacggtggtaatcacatcctgcggatactcagcctgtatttttttgcgcaatcgtcccatcagcacatcgatggtatggctttcgcgcagctcggcgtcgggatagagctgcagcatcagcgaatctttgctgaccactttgccccgattgcggatcagggtttccataatggtgtattcaaatgccgtcagcttgatgggctggtcgttgaccgacagctcgcgacgcgacagatccacctggaaaggcggaatggagataacctgtgatgccaggccgctattacgccgcagaagcgcctgcatgcgggcggcaacctcttcgatatggaacggcttagtgacgtaatcatccgctccggcgctcaggacctcaaccttatcctgccagccttcgcgggcggtcagcaccagcaccggtaccgacacgtcgtggctgcgccagcgacgaatcagcgaaaggccgtcttcatccggcaggccaagatcgacgatggcgatgtccggaacgtgctcacccagatagtaatccgcttcctttgcgtcttccgccgcatcgacctgatgtcccagctcctgcagctgaactttcaggtggtggcgcagcagagcgttatcctcaaccacgagtacgcgcatgccagttctccattttatttatgatattgaacaatttagcgtttattatacacctttaatataaacagctgttaaataaagaattttattcgattttttgtacctcggtctcttgggcggtgaggacaagtccatcttcggccgcgggcgacatcatcggtatcgggcgcagcgtacgtttatcgatcagtacggaatggggttccccatgggcaaacagatgcagctctccccactggcgtagcgcaacgacaacggggaacaaacgctctccttttgccgtcagtacgtattcctgataagccgtgccatccgaggcggattgcatagtgagaatacctgagtttaccaatttgtgcagacggtcagagagaatattacgcgccataccgaggcttcgctgaaaatcgctgaagcggcgtatgccatcaaaggcgtcgcgtacaatcaacaaggaccagcgatcgccgataatatccacgcttcgggcgacggggcaggtttcgtttttcattttttcacgcgttggcatgggctctccgaacggcctggtaagtagttgcattttaaaacttgatgttctagccttcaactggtttcattttgaaaccagataaccaaggtgggcatcatgaaagcgacactgatatctccagtgctaagcgatccgcaaacggttatgcctcgcagcctggtctggctgtttgctatcgccagcggcctgagcgtggcaaacgtgtattacgcgcaaccgctgctcgacgcgctagcgcgagattttgcgatcggcgacgccgcgattggcggggtgattgcggcgacccagattggctgcgcaatggcgttgctactgctggtgccgctgggcgacagggtgaatcgccgccgcctgatggcgacgcaggtgattttactgatcgctgccctggcggcggtgagtatggcttccaccgccgtgatgctattgggctgtatgcttgccgttggcctgctgggtaccgcgatgacccaggggctaatctcgtatgccgccagcgccgccgcgccccatgaacagggacgcgtggtgggcgctgcgcaaagcggagtatttatcgagctgctgctggcgcgggtattctccgggtcgattagcgatctcttcggctggcgcggggtgtacatcttggccgctttactgatgctgggcattgcgcttccgctgtggcgtcggctgccggtattggcggctgcgccgaaccctctgagctatccgcggctgttgatatccatgctggctctgctgcgccaggaaaaagtgcttcaggtgcgcggcgtgctggcattactgatgtttgccgctttcaatatcttctggagtgcgctggttttgccattaagcgctccgccctttcgcttttcccatactgagattggcgccctgggcatggtcggggtcatcggcgctctggcagcggggcgtgccggtaaatgggccgatcgcggatatgggcagcgcaccagcgccgcggccctggcgatgttgctgatagcctggtggccgctgtcgctgatggcatggtcgcccgcggcgctgttggttggcattgtactgctggatctcggcggtcaggcgctgcatgtcaccaatcaaagcatgattttccgtacccgtcccgaagcgcatagcaggctggtcggtttgtatatgctgttttatgcgtttggcagcggtttgggcgcggtcagtacgacagcggtatatgcgcgcggaggatggcagggcgtttgccttctgggggcttcggtcagtctgctggcgctgctgttctggttaataacccgggggatgacgacgagcagatgagggggaggaaaaataaccctctttcccggcggaaagagggtggaaaggtttacttcagttcgtcaaccatggtggtcgcgcggccgatatagttagccggggtcatggccttcaggcgaactttttccgcttccggcagcgccaggctgtcgatgaactgctgcatgccttcggcatcaacgcgcttgccgcgggtcagctctttcagcttctcgtacggcttctcgatgccgtagcgacgcatgacggtctgaatcggctcggccagaacttcccagttgtggtccagttcatccagcaggcggtcctgattcagctccagcttgctcacgcctttcagggtggattgatacgcgatcagcgcgtagccgatgcccacgccgaggttacgcaggacggtggagtcggtgaggtcgcgctgccagcgggaaaccggcagtttgcttgccagatgctgcatcaccgcattggccagaccgaggttgccttcggagttctcgaagtcaattgggttcactttatgcggcatggtggaagagccgatttcgccggcaatggtcttctgcttgaaatggttgagcgcgatatagccccacacgtcacgatcgaaatcaatcaggatggtgttgaagcgggcgacgcagtcaaacagctcggcgatatagtcgtgcggttcaatctgggtggtgtacgggttccactggatacccagcgaggtgacgaactcttcgctgaactggtgccagtcgacttccgggtaggcggcgatatgggcgttatagttccccaccgcaccgttgattttgccaagaatttcaatctgattcagctgacgatactggcgctccatacggtaagcgacgttcgccatctctttacccatggtggacggcgtggccggctggccgtgggtgcgggaaagcagcgggatatcgcgatactgtaccgccagctccttaaccgcgtcgatcagcttgcgccagtatggcaggatcacttcgtcgcgggcggttttcagcatcagcgcgtgggacagattgttgatgtcctcggaggtgcaggcgaagtggataaactcggagaccgcgtgcagttctgccacgtcggcgactttttccttgaggaaatactcaaccgctttgacgtcgtggttggtggtgcgctcgatcgttttgatgcgctctgcatcttctacgctaaaatcggcgacgattttatcaaggtaaccgtttgcgtcggcagcaaaagcaggaacttccttgatcgctgcgtgcgcggccagtttttgcaaccaacgcacttctacctgaacgcggaatttcagcaaaccgaattcgctgaagataccgcgcagcgcgctgactttgtcgccgtagcggccgtcgactggggaaacggcggtcagtgaggataattccatagatcacaactccggggttaaatgagcaagaatttgttttgcctggttaaccagacgattacgggaaaacatcagctgcagacgtccgccgccgacctggtgccagagcaccgcggagcgaatacctgccagcagggcagagcgaaccttcgcctgaacctgagggctttgcagcacggctggagagccggtcacctgaatccgcgggcccagcgggctaatgacatcaacatagatgccggccattgcgctgagcagggtctcggattgcagatcgaaatgttcaagctgacggcgcaggccaccgatacggttgccgagggtatccatggcccctttgctggcggcaagcttacgctcgagcaccatcaggcttagagtatagcgggtgagttcggcgttcagtccctggcgactgctggtattcagcacgccaatgagagtttccagcccgagacgaagattggcttcactaccaccgaacaccgccagcgttgaatccgggtcgaggtcgatgatgctgttcagcgacacatgcagggcgtcgctatcgcagtgcccctggtgcgccagttcctgaaccagacgcgcggcctggcaaacgccggccagcgccagcgtaatgtcataataattcttcgccacacattctccttgtaaaccgccgaatacccggttgaggcattccgcggctaatatgtctgtcaagcctgcagcggcaagcgctgttcgataatcccaccgccgaggcagacttcgtcgcggtaaaagaccgcagactggccaggcgtgacggcggcaaccggctcatcaaagatcacttcaatgcggtcatcatccagcgcttttacgctgcaggggatatcggtctggcggtagcgggttttcaccgtgcagcgcagcgtgccggtcagcggctcgcggtctacccagtgcagctgttgagcaatcaaccccacggacatcagacgcggatggtcgtggccctgggcgacaatcagaatattgttttcgacgtctttgtcgaccacgtaccacgggtcttcgccgccgtctttgatgccgccgatgcccaggcctttacgctgacccagcgtgtggtacatcaggccctggtgctcgccaacttcgtcgccgtcaacgctgataattttacccggctgggcgggcaggtagcggccaaggaattcacggaatttacgttcgccgataaaacagataccggtcgagtcttttttcttcgcggtgatgagatccagctcttcggcgattttacgcacctgcggcttttccagctctcctaccgggaacaggctttgcgcgatctgttcgtggctgagagtataaaggaagtagctctggtctttgttaccgtcgaggccgcgcagcagctggctcttgccgttaacgtcggcgcggcgcacgtagtgcccggtggcgatgtagtcagcgccgaggtcttctgcggcaaattcgaggaaggctttaaatttaatttctttattgcacagaatatccgggttcggcgtgcggccggctttatattcttcaaggaacaattcgaatacgttgtcccagtattctgcggcaaagttgacggtgtgaagttcaattcccagcttatcgcaaacggcctgcgcgtcggcaagatccgccgctgcggtgcagtattcctcgccgtcgtcctcttcccagttcttcatgaacaggccttccaccttatacccttgctggagcagcaggtaagcggaaactgaggaatcaaccccgccggacatgccgacgatcacttttttctggctttctgacattggaatactcactacattgaacttcgaggcggcgtattctagcacgcgtcatccgtcgaggcaccccctgtaaacggccagttaaattcgccgatgagcgacagcgggtagcgcggatcctgctgatagctgcgaatgctctcggcaaccagttgagaacgcaggtttgttgcgttaagaatttcctcagcactgagccacaggcagcgatcgatatcgctatcatgaggctcggtggcgcacgtatcgttaagctcgatagtaaagaggaagcgcaaaaacggggtgcgatccggggctatccactgatgcaggcgaagaaagtgctgcggcgtcgcgcgaatgccggtctcttcccagagctcgcgctctgcggcctgaaccagggtttcgtcggcttcgaggtggcctgcaggctggttccacagcgcttttccgttgatcgtttcttcaacaacgaggaatttgcctttcgcgtgaaccacgcaggcgacggtgacgtgcggcttaaacattggttttccttatggatgcggtgagtcggttttacgccattcgccgttggccaggccatccagcgtatagccgcccatcgcgtagcgaatcaggcgcagcgtcggaaagccgacgtgggcggtcatccgccgtacctggcggttgcgtccctcatagagggtgattttcagccagctggtggggatagatttgcgctcgcggatgggcggattccgcggccacagccactctggttccgcaacccgctcaacgccggcgggcagagtagggccgtcattaagcgtgacgccgtcgcggagcgcggccagcgcgtccgccgtgggttcaccttccacctgaacataataaattttaccggtgcgcttacccggttgagtgagcgccgcctgcagcgcgccgtcgttggtcattaccagcaggccttcgctatcgcgatccaaccgaccggcagcgtagacgccggcaaccggaataaaatcttttagcgtgctgcgtccggcttcatcggtaaattgcggcaatacatcgtatggtttattgaacaagatcacagtttttggctggcgttctttgcgttgtctggtgacttgttgcgtgctgaatcgctcaacgcgatgttttctaaatgaagttttttgcatggtattttcagactcaatcaattgccgcattatagcctaattacgaatgcctttcatggatgcaaacattcaggtagtattgacatgctcattacaacttattaacaaaaaggttgctcaaaccgattcgcattacaggaaggcgacacggacgcgaaatctccggttagcgggatattccgatgacgggagtgggcgagtaaagccaacgcccggctagcgtgaagagggaagagcagaaccagaagcgctcgaaggagaggttaatggaaagcaaagtagtagttccggcggaaggtcaaaaaatcaccctgcaaaacggcaagctgaacgtccctaataacccgattatcccgttcatcgaaggtgatggtatcggcgttgacgtgactccggcgatgctgaaagtggttgatgctgccgttgagaaagcctataagggcgagcgtaaaatttcctggatggaagtttacaccggtgaaaaatcgacccaggtttatggccaggatgtctggctgcctgccgaaactcttgatctgattcgtgaatatcgtgttgctatcaaaggccctctgaccaccccagtcggcggcggtatccgttctctgaacgttgctctgcgtcaggaactggacctctacgtttgcctgcgcccggttcgttattatcagggtaccccgagcccggttaagcatcctgaactgaccgatatggttatcttccgcgaaaactctgaagacatctacgccggtatcgagtggaaagccgattctgctgaagcagataaagtgatcaaattcctgcgcgatgaaatgggcgtgaagaaaattcgcttcccggaacattgcggtatcggcatcaagccgtgctctgaagaaggcactaaacgcctggttcgcgccgccatcgaatacgctatcaccaacgatcgcgattctctgaccctggtgcacaaaggcaacatcatgaaattcaccgaaggcgcgttcaaagactggggctaccagctggcacgcgaagagttcggcggtgagctgattgacggcggcccgtggctgaagattaaaaacccgaacaccgggaaagagatcgtcgttaaagacgttatcgccgacgccttcctgcagcagatcctgctgcgtccggcggaatacgatgttatcgcctgtatgaacctgaacggtgactatatctctgacgccctggcggcgcaggttggcggtatcggtattgccccgggtgcgaacatcggtgacgagtgcgcgctgtttgaagccacccacggtactgcgccgaaatatgccggccaggacaaagtgaacccaggttccatcatcctgtccgctgagatgatgctgcgccacatgcagtggttcgaagccgcagacctgatcgtcaaaggcatggaaggcgctatcgccgccaagaccgtaacctatgactttgaacgtctgatggaaggcgctaaactgctgaaatgttcagagtttggcgacgcgattatcgcgaacatgtaatctggcccccagattatgtcagaacgggaacctggtggttcccgtttttattattagttttcgaacggttatcaaaattttatcaaaacaagttatcaaaacccctcccgaaaaacctcataaggccaccgttgtccaccccttcccacgatcatcatggtacctatccgtttgttgttgagttttatgtccaagtaaatctttcgtgtttataccttgggctttatataaccgctcggaaagcgatctttgttcatggaaagttgccggtgtaccttgtccccagtcaatatctgcactgtctcttgccttgctgaaattcatggtcagtgttctgggtttcacctgtgctcctcgctcagcctgtgaggtggttctaaagaaatgaaccaaataagggcttactgcataatcccggcaacgactgattacatctcggaggctccagttgattgcgttgcaacgcagagctaatggtatagcgattttgcttccggttttctcttgctcaacgtgtagatgatcgtcccagatgtccgagaatttcatacgggatatatcacctagtcgctgtcctgttactatggctaaaagcatggcgttccccatgtatttgtgattttcatcggctatatcaaaaatcttttgccattcctcaagagtgaggcgctggcgagtgatctttctacgaggttgtttagttgctagtgcagggttataaccaggaggtacttctcccgcatgctgagcttctttaaaaacatctattaggacagagcgaatgacctgagccattctgggttgtccctccgctaaatattcatcaagaatttgcgcaacatctcgaacattgacagcggatattaatttcattcctacccgttccttaagcagagatactggttttgctttttgtttgatagtgttttctttaatatctccggacttcaatctttcctgctgaatcttccagtaacgttcaagccaggtgttagttgatattgattttcctgagctggtggaaattctgtcagtgattgccattatctggcgggtttgttgttccgccagtcttttatttgcttcaatagctattgccgtggcctctgcttcgtctgttcctagactatgaaacttaccagttatcgggtgcttataacgccagtatactttattaacctttctgctgaagagcgggtataaatttggaatagatatattatttttacgtggtctggcagccatcgttcaaaatcctctgcaaaagaacagggtcgcttttctttactacaggagtggtcaatgtaccgaccaactcagcatcctccctgacgcgccagaatcgaccttcttttttggctgggggagaaaacatattctgtttagcataattcctgagagtggaaacacttggaggattgcttctgtatttctcgtttgcccactcttcaagggttaacatctggagcatatgttttacctcatcatggcccattgctgggccagtatctgaaaatacaaaatcagttttgcatcaatttttgcagcacctgattgccggcaattattcgctgccagatcgctgatacatagcgggcctgatgaatagcatcagcgagggcattgtgacgagacccttcaaacgggatcgttgttttggggtcgaagctaatggcttggccgagctctaccattgttcgtacgtcccgatcgttccagtattcccacggataatcttcagcaatgcaatcgtaagaagaacgcagaatagagtagtcgaatgacgcaccgttaccccatacctgcgcctttttgctcccaccagcgacattatcagaaacaaattctctgaactggagtaatgcatcctgcaacgggatagcatcatcatttacgatcgcagagcgtgcttcggaggactgcttaagccaccagataacagtagatggatcgattacggcgccccagttcacggaggattcaaggcatacgactttatagaaactttctccaatagagccggttgccgggtcaaaaacaaccgcaccaatagcgacgataggggcgttatgttttttacccatggtttccagatcaaccataacgtgaacataatcaattggctgatcttcctccttattatgatgaccggattcaatatctacagaatccgtttgatgaacaacttcatctgttttttctttttggttaaccttgcccgtaacgtcaacaagaccttcaatggaaaatactccgtccccaatttttgaaacttcaggctgcctggtcttggtaaggtcttcggttacccacttcggatccgtagggtcgctaaccccttcaacatattcgccgcgctcggcggccagaacctgattagcgtccggacgttgcttttgagcctcttttaccagttcggcaccaactgctttaatgtcggaggagagtgtttccagttttgcgctgctatcctctccggcgattacttggtttgttgcatccagagtgactgcagcagatggaatatgtcccgccttggtaagcgtctcagcgctcggggtatcatgcttatgttcagtcagattcgcgttgatgtagccacgcaaccgatctggaaaaggagttattccactggatgcttccctgatcagtgcaaaaatcgctgcacgggaataatcaaggatgcctggtgtgctccgtaatgctgcagaccattctttaaatggactttctttcttctgtactatttccttcgcgcggcggtggactgatgccggaaaattatagatgtcaaaatccataggcatcgttgcaagagcgatctctatatccagagtatccagcgaatgctgataatccggattgcggtcagttttgttaccgccgccagcattggcgccggcatcggttttgtttattgaggtgatatagtttccagcagcccattcctttgtaaggatcccgcggtcaatgtgcgacgtttcaagccacaatttggcgaactgaatttgcttgccgagctcatggcgtttctccacaggaaatacgctcttaaatgcactggtaaatttccacaggccaggcatatcatattttttaagctccggaatattttctgccgtcagcagcagattctgcacaccgtgattatccgtatccatttccatcgctgaaaggcggttacgatgaggaatgctaatgtgatacacgtggcgctcgtcggccatatactgggcaagcagctgcgtgcggaatgacatttccgccaggttgaagagtgcttcttcattgttcgaataatcctcttcatcgctatttgcaggagagatatcgttttctggtttactggagggctgtggttcagcagccgctggcgcaacgattttttgccatgtcagcccgtcttcaccaccaagctcgtagcgatcgcaccaggtgtcatccagtacaccttcttccggtaagtcatcaacgatgagccagttggtgcggatcggcagctgatggctggcgccgcggccaacgttaatttcagcgtcttccaggatgtccaggattttgcgctcggcgcgagaatcggatttagcagagaaccagcagaagagacttttcgcttcgtttgcttttgccttcgctttaatgagatacgggtagttgttcattgcgtttgggctcctttggattgtaagatacccggcagctgatggcagccgccttggtggtggtcattggtcaaaactcgattccggaaagctttggtcggctgaccgggtacttaacccgccttgcgcgggttttgtgctttatggggctggcgaatcgccccgcagcagctgtgatacgcgaacgtcgtcaagcgctcgcaggataggctcaaaagttttatgggctggcagtttagataccgcagtgatcacttctgtaacggtgatgtcatcgccgcgggggctataaccaccacctgggccacgctgtgaaattaccaggttacccgcccgcagctttttgaagatctgctcaaggtatgaagtagacagctttgactctttactgatggccgtcagtgaaacgggcgagccgtcatagagcttattcaaagtggcggcggcctggacagatgccagaacgcgtttcattccaaattccataatcacttctccggccgtaacggccattggtcaaaactcgattcaaaaactcactgcaggctgttggtcgtcagccatgttttgtgcatttcggtaggggaggcactggccctgtactttttgttcatcggcgttgctgttgcaactggcctctgatggataaacaccgttcagaacatcagagcattcaccagtgagagcacaaacgctaatgacaagggcaaacagggtattcatgcctcagcctcagggtttcctttctgcgccagcaagtaacacagctggcgtagtctcacctcgaaccagttcaggcgggtcgcctggttcccggtaggtactcgggcaaaatccttcatagttatctccagttaactcagtattaggatgtggttttgcaatgcggcgccgggtgcctcccggtgacggcagccagttaacaactaccgccgacaactttttccccacaacgtgtgaataaccgccatgtttacttttttaactgtgtcgcgtgcgcatagccgcattcaccgcattgcaaaccctgattttttattttcactacttcgacgcgcttcgtcggtggtgtcgtgacgctgatcttcacgattgagctttttcaccctgcaattcaccaccacgaagcgcgcaggatttccattacatttcagaagaggcgcagtctgccggcttacctgaaagcgccgcggtaaactcgctgaaactcagcgcctcctcaccttcagagaggctttcaaaatagtcttcatatgctttatccatactcatttccttcccttaaggccgggcagccgaacgttgaacctgctgcgattgatattgctgtcatctcatccggtgtttcgtatgccgccggcagctactacgtgggcttcctgcctcgatgacccatactgcgttgtgtgttttgaagtttcacatgtcgtgaaattgttgtcaatacgaaatgtgaaatcaaaattactcattttgtgtaatttattgatgagggtacaaaaaaaccggctcaaggccggttatgcaatgcttattttttagattgagttaggtggggttgtatcttccgcgtaggtatttttctacatactcgtcaatttccttaagtctaagctcaaaggtatcgatcatgcgttcctgttcagcttcaggcaattgattgaatagggaaagaacccttttttgtttgtctgttaaccagttcgatggatcactttgttcgccaaataaaatcataacgggcgtggtgcctaatgctttcgctaaggacaatgcatcatctacaccaacgtttcgattgccatattcataattggcgacacgcgacgccccagaccagccacataatttcgcaagctgcccttggctcattcctttctcagttcttagcgccttgatgcgctcaccgatttcttcagcaagtgtcttcataccctcactttatcacgaagagtgaatattggtgattcacgttttgtattgacagtaatttcacgatatgtgaacatcgttttacacaacaggagaactgtatgaaccacatttcgcatctacggaaaaaagcccacatttcgcagcaagccttggctaaggcggctggttggaaccaacctcggttagccaactatgaaaaatctttacgcgttccaagcctagctgactctcgtcatatcgtggccgcacttaatacgttaggggttagttgttcgcttgatgatgtattccctccagaaccctcaaatcccggggagtaataaaaatgcaaaccatctcttttgaaaattatacccaagacatggcggtgcaactgaaaaccaaaaatcactattcgccgacgcgccgcgatagccagaagtgcagggccattcttgccgctgttcaggaatgggaatcttttttacctggccgtgcacaggaccacatcgcgcagctggtggctgagcaatggagaatacaaaacggtcgcggaattaacgtcaataaacagaatctgtaccgctacctgaaaaacgaatccggttcagataagtacgccagttacgttatgcagctttcaggagcgatcgctgatgcaatgcctattgagattgcgcgcaaacacggattgaaacgtggattgactgaaagcgagctggtggctcaagcaatcaaagagtgtagcgaagcgcaccaggcaaaattgcttggcgctccgttgcaaaagttagagcgtgaaattcgggaggcagcaattgcactttttaacatgcttcctgcagatgcggcgggaccactactggcgagcataagcgccgtagcgccacagtttttttaatcgagttttgacaatgagtaccgtacagaaaataggggggcttcatgagcattgacgcaatgcgatgggccaaaaaaatcaagacagggaagtcctctgcaaaagcggttctgacctggatggccgacatgtgcggagctgatctctgtgcttttccatccattcctgcgctggcagaagcaactgagctggataagaaaacggtccagtcgagcctgcagtatctggtttcgatcgggcttattgaagatacaggtgaacggcgtggaaagactaaacaaatcccggtttaccgacttcttggtgtggaagaaagcgttgctgaaattgaacacacccaaaaacgggaacattaccaaaaacgggatcgtttaaacacacccgaaaacggggttattacagcagaaaaggcgcccgaaaacgggactgtttcctgtacgcaaaacaaccaaacaatcccgttttttccgtcaaacgatcccaaaaacgggatccggaatctaccagaggaaccaaaagatataacccccacacatagggttctggtcgaaccagttgtgccggcctatccgaatcaaccgggaatagttcctggtgaaacacaatcattcggaaaatttgcgatgtatttcgggtggaaaccttccgaggatttttcccggctggcaacgatttggggaatgccattaagaccggggataaatcttgctgccgagttgagcagtttcatcgcgtactggcaggctgaaggcagggtgtttcaccaggtccagtgggagcaaaaactagcaagacatcttaaccgtgcggaagtccgccagaaaaaaccagtgaacgggggtatcgatcatgtgggagtacgagcagagccagcagcatccagagctgttcaacagattcgagccgcccgtgagcaacggttgcgagttgcaggatcagatggccgtagaaacggcatggcgcctatgggaagtgatgggcgaaatcttttcgaaccggtggatcctgaagaacggagaggaaccatcagaactctggatcgctcagattggatcgatgagtgaagcccagattacgctggtttgccggcagtgcatggaacgttgcgccgcgggcagcacatggccgccggatctcgctgagttcgtcgcgctggtatctgctagcggtgctaacccgttcaatctgacatccgatgcagtgatggcggagtacaaacgctggagaaacgagtcttaccgatattcgggaagcgacaaatacccatggaaacaggatgttctgtatcacatttgcattgagatgcgcagaaccggagttgagaggaacctgacggagggagagctgaaaaaactggcagaaaacttactcacgaaatggaccaaacacctggctaacgggttttcgattcccccgattcgtcggcagttggcagcaccgaagcatccagcagggccgacgccagcgcagatcctgatggaagagtacaaacgccgcaaggcggcgggtttaatcaagtaaacgagttttgaccatgaccaaacaatcaaaaaccaaagtaaccaaagcacagatggtgcttgccatcgttagcaggacgccagaatgcgtcctgcaggatgtctgcgatgcgctggacttgcaagccagtacagcaggtaacttgctgcggcaactacatgccgtgggaaaactccatcgtacccataacggctaccagtatgtctaccgagttgttgcaggcgttgaggttaccgatgttgccctgccgcaggctacaacacaattatctgaagaggatatgaaaaaaatccaggaagcactgtcccaggctaagacgctggaagacaaaaagctgtggcgccgggctgcgactgtttacacatcgacgcttgggatggctacaacagcaaacgaactctggttacttgccaaaatgcgtaaccgctgcctgcgcaatgcggcgaggtgctgattatgcctaaaatggaatcaacagcagctggtgcgggatgtcaaagctaagtttaaatattccggggtgaggcaaagctgagatgtccgctgagtgccagaagcggaaattacgtacatcacagtttttaatttatggacgtcggttacagcgctatgcacaaactccatacataagaggggaggccgcataagccatgcggcctttggtatcagaatgtcagttcaggcatctgttccatcacaaacgctaaaactttctccgcgttgagtgacgcatagggcagactttcaataattgcaattgaacgagagtccccgacaattttttcaatctcggagaccttgtactgaatgtgtggtgcaatcagaaaaccgtcaaaagcgggagctacactggcaaaattatccagacccacagcgctaataatgagattgtagtcctttttttctgccagcaactgcatccttttggcgagagaatttgctgtattaccaaacaaacaacataccagaagctttttcatattttacctcctgagaattgttcacagaataattctcgacatgctgataaaacgagctttgcatcttttttgcatgacaaatctccagcagagttgatgtaacccaggaaagacgaacctgccgtattgttggactgacgggatgcatctggatcttttgtgcagccgcttgtctacgacgtttcgtcatttggccttttgtcagctgttcgctcaaagcagcctcttagagacttgcgtgcggaaagattcgggttgcatttagggatcgcaatggacatcaatcagcatcgaagatgaatacgtgaatactgggcaggtatgccggataccccctcccgctccacgggcggaagggggtaaataataatgtcaggccggtctgcccgcgaataaagaagtcgctattttttttgggtgattttcgtcactgaacctgtttgagttttgtccccgacagcgccatacatcgagaccacataaacggcgccatcaggcgcggcagtcaggtggtttggtgtttcatccatcggaatattagcgaccagtttaccgtccttgttcagaacagcaacggttccacctgcacgcgtggcggcgaaaacctgagacgtcactggatcccagacgacagatacgcctccggcaccaatataagtatctgcgagaaccttaccgtccgcatcaagaaccacgacattgttcgtttcctgggaagcaacgtaaagacggccagtcgccggatcgcgagtgatgtctgttgccccctgcgcctcaggcactttcaccgtcgtgctcttacccgttttgagatcaatccaacctaaccatggcgtatcacggctgacgccgaaaagtttccctcctgcactgtcaagggcaagatcggtattgttaaacatgtttttgccatgttccactacgaactcaagttgaccgatgtgttcaagtgattttgtgtcatatacctcgataaatccggtcagcgctgcactgacataggcacgattgtgggcttcatcaataatcacatcgcgtggatgtacaacagacccttcgggaaagactttcaccacagaaagggtctttgcgtcatagacggtcaccgtctcggcaagcgtgttcgtcgtccatacatggttatgggcattatcaacaccgactccgaatactccaatctgctctccctttttgtctttaggcagcgtcgcctccgcttcgacagccagcgttcctgcgttcagtctcatcagccggctaccatccttcgggccgcgtgcagaagtcacgaagagcttcccatcggccgacactgccgactggtaagcccgctcaccgacgggaattgtttgcagcctgaaagcctcagtgtttttcgggggaacaaccttggacaatttcaacataacctgcgaaacgctcgcgggattttgcgtgataacagtgagtggatgaaggcctgtagcagcgtcggccggaacatttagtggaatagtgagatttcccttctcatcggcagccaatggcttcggcgtaaggacttcagcaccattcagcatggtgacagtcgcacctgttggcaggttcttaatcgtgatcaccgtgtgatctccgggcttaacaggaacttcccgagatccggcacgaatactacctggaaaggtcgtggtggctgctgcccattgactatcggcgtatgccgttacgacggttgatattgtaatagtggaggccaacagcactgaacggactgaaattgttctcatcttatctccataaactgtattgatgctgcatctcaatgcagccacagattattcctcacgtactgagtattaccttctgctatgagaaatatgtcttgttatgagcatactcaatatatcacgttgatgtaaatgattatcattactattttagtggtatatgaatgctaggagtttgatgttcagcgagctgagtttagggggatcgcattgtgccaagtgcggacgctcaggaatatagtttcagccactttaaaagcgaggtaagcgactcgacaggtccagcatgactaccaggtgagcgggtttcatcccatggcattgcatcatcagtgcagaagtctcctgcacattccatttcaagacgttcgtcaattaaaccaacattacagaagcatgtgaccgggtgttgccacttgtgtactgaccatcttaataaattcgagtgtacgccagaggtagcaacgtttcttatcaacggtgttgatcaccacaaaaatgactgtatccctgtgatagcggatttcgtcctttgtggagaaaagatcaatctaaacatgagcatgggttagcgaaaagtggcattaaacgcttgaacatttcacctaacaagtatactgtttatttatacagtatttgcatgaggagctagttatgaaagtggaaatcacaattgatcgccaaaaaaaattgccggatggcgctgtgcctgctctggagaaggagctactgcggcgattggatcaaaactttaataactgcagtcttgtgattcgtcgggccatctctgatgggttgaccgtgcttggtggaatggacggagataaaacacgtgtagaggaaatcctgcaggacacctgggaaagcgctgatgactggttctgttaatttgaggtccagtggcttgcctggtttattttgaggattttgctgtgagtaaaaaacaagaaatgccgaacaccggctatgcaattatcagatgcgacgatggtgtgatcgttgcccgtctgacatcctttcctgtatgtgagcgcgctttgatgtaccggcgcggcgatactgtttcgtttatgcctctgcagccggatgagatcgtggggactctctctctcttttcacagatgattgaaaaggctaagtctgtagttggttaccaggttccccctggttctgttacaatcccgtcataggcctgaacaacctatacctgctgcgtcgcggagagaaaccatgacgcaaacccccgaagtatcaaaatcccatcagactggtgctccttcatcgagcgccggtttgctttcgtcttcaaaactaacttttcgccagcaggaagttttcgatctgctggtggcctacatcaatcagcatggctacccacctacgctatctgagctggccgatatgctcggcgttagctcgtctaatgctgtcctgttgcatctgcgtgcgttagagagaaaaaattttataaaactctctcgccgtgtctccagaggaatttccatcgtcgggcgaaaggagcctgtgctcgccgtgcagctgctgcaggaaatgatctctgaagaacccggcgcgcgtgaaagagcgattgagtttttacgactgttcggtgatcagccatgaagaaaagttggtttttacacgagcaactttcagaggctgaagctacagagctggtggagcgataccgtaaaaagaactgtgtggttgagaagagcttatccagagactttgcatcgtgggagatccgcgtgttgttgccggaatcgaagaagccgccacggattgacaggacctacatacagaagatgtggagggactgatgcgagctttgcttaatgtggatattgcacgccatcttggaattgtgctgcttaagccgggtagtgaattaatgccgttattcggtgccggccgagttcttgttgaaatgccgccggcaagcatgaaaaagatacccagtggacgtcttccttatgcccggcagccgttgcgggatgatatggggatcagaccttttttcatgaagaaggcagttatcactgcagctggtggggttagtgccctcaagtcatggttgcgtaggcaggttaaaaactgtcagtggacacattccgattaccatcaccatgagctcgtcccgtttcgccatgcgacgggtgtaataatcgcatgctggcactgtgataatgagctgaaaaaccaaacggaacaaaccctcgatcaactggtaggtgttaacaacgctgactgggtaatcgacactgcccgcatcgcgcttagtctggacgctcagcgctcattgtcactggcggagctatgctggtgggcggtaggcgccggtattggcgatgaaattacagaagaaatggcgcgccgatccctgcgtattaaagacgatggcattaaatcagtttacagggagagtgagattattccgtcggtaccggccaccagtattctttctccccgtctcgaaaaaacaatcaagccaacggcaataataacgccgggcaagcctctggttcctgtgaacgtcgatcctgttgctccggcgacactattcgcgagacctaagcggagccgatggttatcagctgactttatctcatgggttaaaaaacagccgtgtatgtgctgcgggcagcctgcagatgatgcacaccatcttattggctgggggcagggcggcgtaggcaccaaggcccacgatgtttttacgatcccattatgccgcaagcaccaccgtgctttgcaccatgaccctgccgcttttgagcgtgaatacggcacccagccggtattgattattaaattgctggaccgggcatacgcgctcggcgttctttcctgaggagctttaaaaatgagagatatgtacgaaatattggaccgttggggagcttgggcggcttctgacaatagtggtgttgactggcaacccattgctgctgggtttaaaggtttgctacctcatggaaagaaaacacgccagcaatgcgatgatgatgaaggtatcatgattgacggttgtgtagcgcgattgcggaaatataagccagaagagtatgagttaattattgctcattttattatcggaatctccttacgtagcatcgctaagaaacgtaaatgctctgatggtaccatcaggaaagaattgcataaggccatggggttcattgatggtatcatttctatgatactatagtttaaatggccgcatcggcggccattttttatgctttacgttttgaatttgatcgaaacctttgcttagttatttcagagttgaaatagtcttcatccaagaagttaagtaactcttttatttcttttttatttgttggcatttctattttctcggagcttcctgagccggtcgtttttatagggaagttcaaagttagcgctgcgttttttatttcggttacagtatgatttaccaatattttagatttgtttattaatgtgacttttttcttatgacgttatctgcaagggctggaagatcaaaccccactggtatattaaaaactggttggtttacaaagtcagaaatctcttgctttgttgcttcagcaaaataagaactcatatcaaatatgcttctcaggttgttgaagttcctgaactttattttatctccttcaaggattgcaactaatttatcgtctagattgaaacccaaaagatctgacatcgtaaatgaatttttactgagccataagtatcttgactcgttaagtatctgtttttttgaaaaggtttggattgctattttgtctttcacttgaggatacgcaggagccataaaaaaagctgttatatcattaagcccaacattttttgtccacaaaggcattgcggtgctacgctgaactgcatcaagaagtatttttccttcatcaaagttatctatataactacattcattatagctaggggtatatccggcttcgaaaacaagttccgtattgtgatgactttcaaaaagagataattggtcatcaaatatttttttgattttgatgtctgtttgtctgtcggtatcaatacgatacactttcacagcagagtttttattcatcattgcaaaaaggctcatattatttccttgttacatgcataaatgtgtagtctgtaagttgaataacttcaaaatctctgttttttaaatttgtaataacttctttggatatcaacacaaatccaacgccagtatcgtcttctgcttcataaaatttaaatcctaaagcggagataagagggttgaaattatagttctcagagaaacatatataaacgataagagatatatagaaaaatactgcatattgccatttatcggcgattgaatctgtccctaataaagggaatagataactcaagaaataattggtaacctctttatttgcaggagatatggtctcaacattcttataaagagaagggaggtttttatttgcatagtgtaggaaaaaaataactgatataaaactagcaagacagatccctaacgaccaccaaataagccatggcttgtttttcatatatcctataaatatcagcgtgatacctacaggagctatcgaacttgctgttaaaagaaaccttgcaattttgttcattgaacactcccatgatactgtttttttgtacagtataaatcatgtggatgtctaatacatcatccttgtgaaaaaacactatacacaaatgagtaacgcgtacgcaaaaactatcgtaatctgttaagagtggtcacttagacacacagcttaaacatcaaacctcgccaaatggcggggtttttgcttttcaggcctaggctagaacctactgattaggctggttacctggagcctgagacctatcccttatctttccgcgtccttacttacctggaagtagatacaatgaaaacgttcaacaactggtttgagatactgagttgaagagttagtagtatggagacccccctctgtgcaccttgctgggttctactgttaaggcttggcgtttatcaaacacaggcagttatacatctgacattgacgcttcgaatgtttggatcataaattattgatgtggtgaatccccctatgcggaggggcgaccagtcagttacagaaacctgtaaatgcagcgcgggtcatgccgactggggcatgctcaccgggaagcacccgtcaccacactgccactaaacatatttaagatttatggcaggtttactttacttttgcggttgcccttctacgtttaaagaacgtaacggtaaaaacaaatgcatcctggtaaatcggtagctcggacaatcaggcgcgcccttaccgttgctccttgaaatgccaacttcagcccgcctctctcagcgggtttctttttcctcgtaaccaattcaaataaagcatcaaaaggcacagcttttcccttaactaatagccactcccgtaaatgagaaggagaggggaaggatgaattacatcgaaggctttggtcagagcaacgcatggcattgaagtaacgttatcgagatgttaagttttatgggtggtgaatccccctagcggaggggcgtaaacagttagaagcgaatcctcagcgcgagtcacggtgactgaccaacgacttaccgggaagcacccggcaccacaacttcacctcaagcccacgtaaacgcgtgggctgttcttttccagcggctctattcaaaggctgcgcatttgcgtggcctttttcatttcaggctcacgggaatcatcatcgatacggcttgttgttaaatcagcccgatgggcctgttcctatcaaacacacgcacagcacccgcacacagcgaggtgagagtatgcatcgcatggacaaactaacaaccggcattgcctatggcgcatcagctggaaacgccgggttctggatgcttcaggtgctagataaagtcagtccatcacaatgggcagccattggcgtgcttggcagccttctttttggtctgcttacgtacctgacgaatctgtatttcaaaattaaagatgaccggcgcaaagcggcacggagtggtgatgggaaacagagcgaaacttagtgcagcaatgctggccctcattgctgctggtgtatcagctcctacattgatgaatcagttccttgatgagaaagaaggaaacagccttacagcgtatcgcgatggcagtcaggggatctggacaatttgccgcggggccacgcgtatagatggtaaacctgtcactcagggtatgaaactgactcaggccaaatgcgatcaggtaaacgcgatagagcgcgacaaagcgctggcatgggtggatcggaatatccatgtccctttgaccccgccacaaaaagtaggcattgcctcgttctgcccatacaacatcgggcccggaaaatgcttcccgtctacgttctatcagcggattaacgccggtgatcgtaaaggcgcatgtgaagcgattcgctggtggataaaagacggagggaaggattgccgggtgcgctccaataactgctatgggcaggtaacacgccgtgatcaggaaagtgcgctgacttgctgggggattgaccagtgagtgcagcctacttaaagccagctatcgccgtaatgattattgctggtgcctttgttgctggtttagcctggagcgatcgggcatgggaaaagcggtgggcagaacgtgatagcgacgaatcgtcccaggaagttaacgcgcaaaccgctgcccggatgattgaacaggggcgtctgatcgcccgcgatgaggccgtaaaaaatgctcaagcgcaaacagctgcagcgcgtactgctgccgctaatctctctgatactgttagccagctgcggcagcaggcaaaaaaacttgccacccgcctggacgccgcaagccacaccgcaagtcttgccgctaccgtcagaagcaaaacaaccggcgccaccgctggagtgctcgccgacatgcttggcaaccttgcagaagaagctcgacggtatgctgcaatcgctgacgaacgctacacagcaggaatgacctgtgagcggatttacgaatcagtaagaacgtctatccccagtaagggataagatgatgtttatccctttgtggggatatcaactgaatggcctcgcatctgcggggcttttttattcgcaaaaggtaacgcgatgaagaacttaaaaattgcatacgtagacgagaagctggtggcgattgagtgtgacagattgtcatgctcatcgctgccgtttcagagtttaccatcgacagtaccgctttaactctccctcaactcatgctcgaggatgcttatgccgccacgagctaaacgaccttgccggcacagaggatgcgcgactgtgaccaatgatgtcggaggatactgtgagatgcatcggcagcaacacgctggtgatggctggcgtaactaccagcccggaaaaactcggcaggaacgtggttatggtcgaccgtgggaaattaaacgggcccgtatcatgaagagggataaatacctttgtcagaactgcaggcgagacggtattgccacgaaagcctcaagtgtcgaccacatcattcctaaagctcatggcggtaccgatgatgactttaatctggagtcattgtgctggacctgccacagcaagaaaacagcaacagagagaacccgatgaagagtttcaaaattgaatacgttgatggcgttttgaccgttctggagacggatggtcagtcacgaatgaatgaagccgtgcatggcatccattttgagcatgtccagggcggccgcccattgctgaaactgacgattgcgcatgatattgcaccggcaccggctgctgagtcggctcaggaacctttagtgggtgagctggtacaggatcaacaatctccgtttcccggcggtcgtcgttcccgccatcgtaggggaggtaagcaatgatgtataaacgcacggatctgacgctctccatgttctatgcatccagcgctgatgcggagggaaacaaagtggctacgttgacgatgcaggtaattgcagcagaggttggagccgtccagaccagccagctgcgatgtataaccgatagcgcgaagaaaaaaacgtatagcgtaggtgaacaatctgtcagtaatggttccgatccgttgctggtcgcgattgagaattactggcgtcagagcacggatgtcgtcgttaaaggattgatcgccgaggtgaccgacttcatcgcagggaacatcaactcagttagcacctggatcggtcagtttgggatgaaggttttcgagaaccagccattagatgaacggcttccagaaagcgtactgcaggccgatggaggatctgctacagcgacaggatcctgaccgccggtataacaactggtgttcattgaacgtctgagatatgccggcccacgcagtgcgaaccgtattcgccgccggcgcagccggaatgacgacctccacctcgactgaggctgctgcagccaggggggaggggggatcaaatccctgacccctttcgcgcttcgggactgcccgttgaagtctatttttacacgccagaaataagcaacttttttccggaaggtttcatctatcaaaggaacgtttatggccggaggaattcgatcgtccggtggtggccgaaaacccactttacccaccgggcaaaaaagcaaattaacacgtattgcgcctcccgctgagttaatgggggaggcggcaataagaatgtggaagacgcaaagcaaaatactcatcgaccgaggggtgtttgagctggaggacgcacctttgttgctggcttactgcaatgcttttcatctgatgctcgaagccgaaaaaatgctggccagcggactgacctcagaaagtgaaatgggggggctgaaaaaacaccctgcagttaatgtccggaatgactcggtttcccagcttgcccgcctgggctctctgttggggttagatccgctcagtcgtcttcgcatgaccagcggacaaaaggatccggacgatgacgggaatgaattcgatgagtttgactgatggcaacctatccgaacgtcaatgcagcgaaccagtatgcgcgggatatcgttggcgggaagattctggcgtgtcagttaacgatacttgcctgtcagcgacatctggacgacctcgaacgagcaaaggatccccactggccctaccgcttcgataaaaacaaagcagaacgatttcttcgttttgcccagaaaatgcctcatacctcaggggaatgggcccggcgtaaactccggattgaatttgaagcctggcagaagttcgctcttggcgtaccgtttggatgggtacacaagaagacaggcctgcgtcgtttctctgaaatctatatcgaggtgcccagaaagaacgggaaatccgctattgccgctgctgtaggaaattatatgttttgtgcagatggcgagcatggtgcagaagtctattgcggcgccacgactgaaaaacaggcatggaaggtattttctccggcgctgcaaatggtgaaaaagctgccggcattgcggcaaaaattctcgataaaaccctgggcaaaaaaaatgacgcgccctgacggttcggtttttgcgcctgtgatcggtgacccgggggatggtgattcgccatcatgcgccatcattgatgaatatcacgaacatactactgatgcgctttacaccaccatgaccaccggtatgggggctcgtgaacaaccgatgacactgatcatcaccaccgccggctatgacattacatccccttgctatgaaaagcgtactcaggttgtcgagatcctgcggagaacccgtaatggcgaggaaaatgaaaccatatttgggctgatttatggccttgatgatgatgatgactggacgactcctgaggcattaatcaaggcaaaccccaactatggcatttcggtaaaagcagattttctccgggcgaaacaattattgggtatgtcgacgcccgggcagacaaacaagattctgaccaaacatttcaatcgctgggtaagtgcaaaatcagcttattacgacctgagaaaatggatggatgcggccgataaaacccttaagttgtcagattttgaaggggaggaatgctggctgggtatcgatctggcctcgaaagttgacctcaatgccgtggttccggtttttcgtcgtgaaatagacggaataacacatttttactgtgtttctcctctgttctgggcaccggaagaaaccatttactcgcaggagaccgcgctgaagagtaccgcagaacgttatcagtcctttgtccggcaggggaagttgatcccgaccgatggcggtgaagttgattacagactgatatttgaaacgatcctgaaattgcggaataccgtaaaaattgcccaatgccccattgacccttatggcgcgacttcattacgtcacatgctcgaggaagaggggcttgagcctgtcgagataagacaaaattttacccatatgagtgatcctatgagagagattgaggctgcgctcatctcggggagattccatcatgacggacaccctgtcatgaactggtgtatttccaatattgtcggccagtatcttcccggaagtgacgatattgtgcgtcccgggaaggaagggcggcagaacaagatagatggtgcggttggtttaatgatggggctggggcgcgccatgcttaacagttcagtgatgacatccgtatatgatgaggaagatatagcatgctaatttcagttctgagttttattgtcggcctcactggtgctggattgttatcagcaggcgcttggcttatttctccatcagtgggattgataacaggagggattatttgtctgggctggtcatatatgacaacccgggccttttcctccggcgtcagcaatggcggaggtgaataatgttcctaccccagatgttcaggggccgacaatactcgggtaatagcttctgggaagccatgctgggcggggttcgttcaagccagagcaaaactggcatcataatcacgccggaaaccgctcttggactttcagcggtccgggcctgtgtcaccctcctggcggagtcagtcgcgcagctgccgtgcgaactctaccggcgggataaaaatggcgggcgccagcgtgcgacggaccacccggtttatgacctgattcactcccagcccaacaggaaagacacctcattcgagtatttcgagcagcagcaggggttgctggggcttgagggaaattgctactcgatcatcgaacgggacggaaaaggctacccgaaagagctgatccccattaacccgaaaaaggtcattgtgctgaaagggccggacggtatgccgtattacgaactcccggaagtcggtgaaattctgccgatgcgcatgatgcaccatgtgaaggtcttttctctggatggctatatcggcagttcccccattcagacgaacgccgatgtcttggggctgaatctggccgttgaggagcatgcggcagcgacatttcggcgcgggacaacgatgagcggggtgatagagcgtccgaaagaggctgcgaccattaaaagccaggatgctattgatcgcctgctggcgaaatggaccgaacgccattccggtattcacaatatgttctctgtggcactgctgcaggagggcatgagctacaaacaactgtcgcaggataacgaaaaggcgcagctgctacagtcgcggcagtggggcgtggaagaggtctgccggctctataaaatcccgccacatatggtgcagatgctggcgaaagcgaccaacaacaacatcgagcaccagggcctgcagttcgtgatgtatacgctgctggcctggctgaaacgccatgagggtgcgatgcagcgcgatctacttctgcccagcgaacgccgcgatttgtacatcgagttcaacgtttccgggctgctgcgaggcgaccagaagtcacgctatgaatcgtatgcgctgggccgccagtggggatggctatccactaacgatatccggcgtatggagaatctaccgccaattgctggcggggacaaatacctgacgccgctcaatatggtcgacagcgcgaagatccttcctggcgataagtcgccgacagcaaaacagctggccgaaatagaatcccttctggccagagcctgattatttcccgccgcgcgggatgacctggaagacaacatgacaacgaaattaattaacctgccgcacctggcagatatggtctttggcgtgccgcattacgtgacgcggcaaacaatggactccgtgaaagcggtgctcatcccccgtattcaggggatcaccgaagatgccgtcattcagatggcgctgaatccgggtaaatcacctgcagctgagcaggttcagcccaccggcggggtggcagtgatccccgttcacggcattcttgttccacgccgggggcagattacggcgatgtgctccgagctgaccagctacgagcggatccgcgggcagctgcaggcggcattaaacgacccctcaatcagcgaaatcgttctggatattaactccggcggcggcgcagcggtggggtgcaaggagctggccgattacatttatcagtctcgcgacacgaaacccatcacggcgattgtgaactacagcgcgtattccgccgcgtatttcatcgcatcggcctgcagcaaaatcatcgtcagccagaccagtggcgtggggtcgattggtgtgatcatggagcacctcgatacgtcgaagatggaagaaaaaatggggctgacgttcaccaccatttaccggggagataacaaaaataacggcacccaacatgaaccactgagtgaagagtcgctgggtatgttccagggcatgatcgacgaaatgtacgagacgtttacggggtcggtggccgaatatcgcggcctgaatcagcaggccgtcattgatacgcaggcggggctgtattttggccctggcgctgtgtccgccggcctggcggatgaagtctctgacccccaggcggcgatcaatgctatcgcggcaaagtatcagcaaccccgtcaaaaaacctccattgagatgcaggcagccgcgatggatctgcaaaccaaaatgtaacccggcgcaaacataaaccgcgtcaccttaagcagccagcaggctgctttttttatgtctaaaaagagagaaataaaatgccacatattgaagaattgcgtcgtcagcgtgcgggtatcaacgaacaggttcaggccctggcaaccattgacgccagcggcagcacgctgactgcggagcagctgacggagtttgcgaacctgcagcagcagttcactgatatcagcgccaaaattgaacgcctggaagccgccgaacgtgctgcggcgctggtcgcaaaacccgtgaaagcgactcagcaggcccccggcattattgttaagcaggagccgaaacagtacaccggtgctggcatgacccgactggttatgtctgtcgccgcaggcgcagggaatctgcaggacgcggcaaaattcgcttcagaagagctgaatgaccagtccgtatcgatggccatttccaccgcagcggcgtccgggggtgtgcttattccgcagaacctccacagtgaggtgatcgagctactgagcgaccgaaccatcgtccgcaagctgggtgcccgtcccgttccgctgcctaacggtaatatgacgctaccacgcgtggccggtggagcaacggcaagctacacaggagaaaacaaagacgccaagacatcagaaacacgctttgatgatgtaaaactgacggcgaaaactctgattgcgatggtgcctatttccaatgcactgattggccgcgccggattcaacgtcgagcagttggtcctgcaggatattctgaccgccatctcagtgcgtgaggataaagcctttatgcgcgatgacggtaccggcgatacaccgattggtatgaaggcgcgcgcgactcagtggaaccgcctgctgccgtgggaagctgatgcagcgatcaacctgaatacggttgacgagtacctggacaagatcattttgatggcgatggacggcaacagcaacatgatcagcagcggctggggcatgtcgaaccgtacctatatgaagttgtttgggctgcgtgacggcaacggcaacaaagtctatccggaaatggctcagggattacttaaaggatatccggttcagcgtaccagcgcgatccctgcgaatctggggaccgggggtaaggagactgagatttactttgctgacttcaatgatgtggttatcgctgaagacggcaatatgaaagtcgacttctcgaaggaagcctcttatatcgatgccgatggcaccctggtatctgcgttttcccgtaaccagtcgctaatccgcgttgttactgagcatgatattggcttccgtcatccggaaggcctggtgctgggtaccggcgtcctgttctaacccatccctcagtaaataaggcccgcatatgcgggcttttccctttcaggagaatgttatggctgcgaaaaataaagcagtggagccggaagaaacggtcgcacaggacaaccatgcgaccgtggtcgcacaggcagagcgtaaatccgttgtgttccttgggccgcaccaccgttattcccgtggagatatcgcgtgctttgaaggaacgcgcgccgaagaactggttaagcggcgtatcgcggtatggccggaggatgccgaacgtgcgctgaaaccgaagccgggagacagcgattttgatactgacattggatgatgtgaaaacccagctacgcctggaactggacttcacggagcatgatgccatgctcacgcaaatggtgaacgccgcgcagcggagcatcgagcgtgattactactgcaagctggtcaccagtgatgaagagctgcaggcgctcccggagaccgtccgcggatttatcgcggatgaagatatccggctggctattcagtttctggtcagcgatgcgtatctgaatggccataccggacagtggctggaaaccgctgcggtgaggcatcttcttttccccctgcaggagcatacgctatgagcctgaaaccgggtgatatgaactgtcgcattgcaattagctacgttcagtccggtcgtgggccgctgggcgaaccgctcccggaaaagcaggttgaatcgggaaaagcgtgggcaaaacgggagctggtatcggggcgaaaagtccgcacgctggatcagcagcaggtggtggaaacctgcctgtttacggtctatccgggcgtgctggttgatattgactggaaaatcacgacgaaaaatctggtttataccgtccggaatatcgaccgcaaaacagaccggatcattatcacgggggaggctgacgggcggcatgatagagctggcgattaagggtacgctggagcgcatcaccggcatgaatgcgtatccgcttttactgccggacacggtccaggaaggagcgacctttcagcgtatctctgacccggagatggtctcgggaatgctgcgaacggggatcgtctctgcccgtatccaggtgaacctgtaccttctcgataattacacctcactgctgcagctggataaaaaaatctgggcggaactgaagtcagtcgttcatggccagctggagggcatcccggttcagtatgtggagcgaggcggtatccatcaggataaaaaccagctgacgaatcgtcgcattcagtatcgcctgacccgcgatttcatcattcactacgtggaggactcctcgtgatccgaatggaagttaaagggctggatgagctggagcggcagttaatggccctgggcgaaaaagtggcgacgaaggtattgcgggatgccgggcgcgaagcgctaaaggtcgtcgaggaagatatgaagcagcatgccggctttgacgaaacgtctgccgggccgcacatgcgggactcaatcaaaatccgctcttccacccgcaagggtaaagggaacgcggttgtaacgctccgtgttggccccagcaagcaacaccatatgaaggcgctggcgcaggagcttggcacggttaaacaggttgcagacccctttatccgacccgccctggattacaacctccagaccgttttgcgcgtgttaaccgtggaaatccgaaacggcattgaaaacaggtagcatccgctgccgtataaaaagagagagaaacatggctgataaaacttcgcctgaatatgcgatgttgccggcgggcaccattgtgaaatacggggagcctggcgctgccacgtcagcgctgaaaccgctgattaactgtaaagcgctgggtgcaatggggcagacggggggctttgtcgactgcaccacgttactggataagcagaaacagtccatcagcgatctgcctgacgggcctgaaaagtcgctgggcttcattgatgatccgggcaataccgattttgccgcgctgctgaatgcagcagaggcccgcaagaccatccagttatacgtcgaattacccaacaagcgaacagcgacgatgctcctggcgctgtccggctggcagatgaatgaaatcgccgctccggcgaatgaggtcatccagatcactgttcagggtaagcagaacaagatcacctggggaaccgtcgctgtctccggcggcgcctgattaacttaacctgtaaacagccaccttcgggtggctttttatttttaaggactacctgtgaaagataaagattacctgtccacgctgaaatccgcgttgcttaaatcggagccaaccgtcattaaaaccgagttgtttggcgccaccgtattcatccgccgcctgaccggggattacctcatcagctacgaagagaaaatggctgaaaccgcaaaagctggcgcagcgcgcgaggcatcggagcaagtcatccagatcgtcatcgatgcactggttcagccggatggaacggccattccggatgagtttaaacccacggcagccgagctgctgaaggcccatgaaaaccccgaactgctggccgcagtggaaaaagtgaagcaacacgcaatcggcaagctggaggaagcggaaaaaaactgagtgactcgccctggctggagctgattttctggctggccgaccgctggggcgagcctgacccatccaaaattgccgcgttgccggcaaacactctgtaccactggcgagcctacttcctgaaacagggcactttccgccgtcctggcgatgaaaacgcgccaccaaccgaaaccacacctgcgccatcccgggtcgatgatgaatgcgcggcagtcatgagggcattaatgtaatggcagacgtcgcatctttagcggtcgggctgcacctgaacgcagccagttttaaatcccagctgctgggagcgtatggcgatgcggagaaccagtcacgacggtttaaccgtaatgcccaggcggacgcgaaaaagacggaagacgcctataagaaggtcggtctgtcgatatccgggatggccagccggctggcggggctggcaggagccggcctttccatcggtacgatcgtcaccacgtccagacaatatggacaggcgttatcagatctgcaggccatcaccggtgcgactgcagctgaaatgaaagcgctggatctggctgcgcaggaaatggggcgcacgacagagtacagcgccagccaggccgccgaagcgttaaagctgatggcgtcggctaaaccggagcttttaaaaacgtccgatggactgcagaaggctacgaacagcgcgcttatcctggcgcaggccgccggcacaacgctgcccgatgcgaccagaacgctggcgctctccttaaaccagtacggggcgagcgcgcaggaagcggatcgttatatcaacgtgctggccgccggcgcgaagtacgggtcgtcggagattgtggatacagcggccgccattaaaaatggtggcgttgcagccgcacaggccggcgttggttttgagcagctgaatgccgcgattcaggtgctggcagagcgtgaaattaaaggcggtgaagccggcacggcgctgcgtaacgtcatcctgaacctggaaaagggcacagacaagagcctcaagccatccgtggttggtctcagccaggcgctgaccactctttccgggaaaaatctatccacggcccaggccgtaaaactgtttggcgtggagaacctgaatgcggcgtctatcctggtccagaaccgttcaaagcttgatgagctgaccgcttccctgaccggtaccaaaacggcgcatgagcaggcatccatcagggttaacaacctgaacggcgatttgctggggctgagcagtgcgtttgaagggatggtcattaagatcggccagagcagtaacgggccactccgcagcgggattcaggttgccacggaggcactgaacagcctggcagacaatttcaacaccgtctccagcgtggcgctttacagcctgatccccgtgttatccacgaaactgactgcagggctgcgggagaatatcgcggcctggcgggaaagccaggcggcggtaaaagcgcgggcgcaggctgatgcggatattgcccgcaaaactctggattcgacagctgccatcctgaaacagaacgacgctgagtttggccactaccggcagatggagcggacggctaaacagtacgggatgaatatcagttaccaggatgagtttacccgcctcatccgacaggaaactgaacaaaccaatctggccagccaggcgaaactgaaactggcggcggcaaaccggcaattgtcgatatcagcccgcgcggcctccgttgcggtggggctggcaagaggtgcattaaatttaatcggtggtccgttcggcgccgcgatgctggccggttcgggcctcctttactttcatgagaaagcaaaggaggccaggcagtcagccattgatttaaaagatgccgtagtcgaaaccagtgaagcgctgatgcgcctctcgcttaaccagctaaatgtgaagcagttcgacctggaggatcagtacgaaaaccaggtcgtgcagcgtaaccagctgatgaaagagattcaggatgccgacagtcgtatcgacagcctgaaagggtttgaccccttcggccagctggaaggggtaacaaaaggccaggcgcgtgcacgggcggatctcgatagcgttaacgagggactccgcaaaaccgaggaaaacattaagcgtgtcagtgatgcaaaaacactggctcagctgggtttatcgggaaaaataacctcccttacggacgatctgaaaggggcgttaagcacgccccccaaagagaccggagatggaaatccctggggcggcgatggcggtaccggcacggggaaaggcagtaagtccaaggtcgaccagttcaaaacgctgcggcagcaaattgaagaagcccatgcgtccagcctggccagaattaacctgcaggaaaaggacagtaacagggagctgcaggaagcggcgaagaaaaatggcgccagtgatgctgacctgcagcgcgcgctgttaatgaccgcagagaattaccagaaacagcgactggatctggccgcgcagtattcccccgcccaggaaactctgcgaaaagagcaggaagccagccgggacctggctgagcttttcaaagcccgccttcttgatgaaaaagagtaccaggccgcacgaataacgctggccagagatactgcgaaagagctgctgcaggcgcatgccgatgaaatcgctgcgccggcactggatatcgccggcgaagttgatccactggtctcgctgcgcaatcagcttgcgcagcggcaggcattgctgcaggcgtactaccagggcagcgcgatcagcaaagaacagtacgaaatgctgatgcagaaggcgacgaaagaatccgccgatgcgcagtatcagacgtcactggagttataccgatcacagggagaattccagagcctggccgtcgggttatttgaaacggcccatgagcgctcaagcaacttcctgacgagcatgctgacgcggacgagaagctttaaggagaacatggctgacctgttttcctcgctcacgcagtcgatcataaaaaacctcgttgatatggccgctcaggcgctggtcaccagttccgtcatgcaaaccattatgggcgtggtgggcgtcgggaccagcgttgtcacgggcgctgcgggcgcaggctcggggacggcgatccagaatgccgccagtaacttccagttcaacgccaaaggcggcgtttacgactcgccgtcgctgagcgcatacagcaaccaggtctacgactctccgcagttcttcgctttcgcaaaaggggccggcgtatttggcgaggccgggccggaggccatcatgccactgacgcgtgccggcgatggttcgctgggtgtacgcgctgtcggtggtggtcagaacgccggcgcgtcggaagggccaaaagtctatatcacgattgaaggcggaaacacctcaacgcaggcgccgtctggttttgagcagtttggccagcagatcggctcgtttgtggagaaaaaatacagggagctgatggcgcaggatatgcgccctggcgggatggtctggaatgcagttaaagggcaacgctaatggctattgagatattcacctggagtccgcgggttaatccccagcagaccgttaactttcgtgtccggaaggcgcagttcggtgacgggtatacgcaggtatccggcgatggtattaacacccgatcacaggattgggagctgagttttgtcggtacggaggactatatccgtccgattaagcagttcttcgaccgtcatgcaggcacccgcgcgtttcagtggaccccgcctctggaagaggtggggcttttccgctgcgaacaatataaaccggtgcctctgggcggcggaaattactcactttcagccacttttattcaggcatttaaaccatgagccttaacgcgaattatcagaagttagagccaggcgatgaggttcgtctcctggagatcgatggccaggcgtttggcctggatgaggttttgtatttccacggctataacgttccccatactgcagccgaaatcctcgccgctggcggcgacctggataagctgccggcgaaaagcatctggtggcaggggcgggagtataaagcctggccatgtgaaatcgaagggatcgagtcatccaccacgggcagcgacgcgcagccaacgctgcgggtagggaatatcgacggaaagatatccgcgctctgtcttcattacgacgatctggctctggcgcgggttgtcatccacgacacgcaaaaacagtatctcgatgcgaagaactttccggaagggaatgcctcagccgatccgacgcaggagaaacggcgccttttcttcatcgacgtaaagcattatgaagacgatgagaaggtggaatttactctctccagcccgtttgccctgcaggggatgatgatccccactcgccagctgcatgcgatttgcacctggtgtatccgcaatcaataccgcagcggtaacgggtgcgactatgccggcacccgatattttgacaggaacaatcagccagttgatgacccgtcgcaggatgtctgcaacggaacgctcacggcctgcgaattacgtcatggtgagaatagcgaactgccgtttggcgggttccccggcacttcattaatcaggagctgatatgcgtcagaaaacgattaagtccatccaggaacatgcggccgcagaatatccgcgcgaggcctgcggcctcgtcgcccagaggggccgagcggagcgttatttcccctgccggaacctggccacagagtcgaaagataattttgtgctggcgccggaggattatgcggaggttgaagaatggggaacgatcaccggtattgttcacagccatcctgatgccaccacccagccgagcgaactggataaagcgcaatgcgacgcgacccttctcccctggcatattatcagctggccagaaggcgatctccgtaccatccacccgcgtggtgagttgccgctcctcgagcgaccattcgtgctgggccactacgattgctggggcctggtgatgagctattttcggcaaacccacggcatcgagctgcacgattaccgcgtcgattatccgtggtgggaaaaggagtatccggacaatttttatcaggactgctggtatgaatgcgggttccgtgagtttgatggtccaccgcaaccgggtgatatggtgatcatgcaggtgcaggcggataagtggaaccacgccgggattctgctggaagggaacctgctgctgcatcacctgtatggccatctcagcaagcgcgtgccgtatggtgggtactggatggaaaggacgatgaaggtcgttcggtataagtctctatgttaatatttcgtcttctttaaaaggagatgaattagtgaaaattattttagcattgccgattattatcggggcattcattcttactggttgtaagtcaccttcggaagtccgtcagagtggtccggaagaaatatttcattcgaataagaatgtgaatgatgtttctgagtgcattttatcaggctggcaggaaaaaagttttctaacaggacctgtcccggtatatattcagccttataaaaacggtaagactgtctatatagacgtatatacttgggttgcagatgtgattcctgaccaagatgggaaaagtaaagttatttacttctctcaaaatgccagaagaagcgctgaaatgaaatcggtgatcaaatcatgcatataaaaaaggtgtggttttatgattacagttcaggagtcaatggttaatattgagctgagcggtgaattaggaaagcgatttggtaaaaaacataagcgcctagtagccactacaaatgaagctattcaggcgctttgctgtacgatcagtggctttgaaatgttcatgaataaagcgaaagaacgaggattgacttttgcgatattcaagaacgggaaaaacatagggctaaatgatttttcttatcctgttaatgatgaaactataaaaatagtccctgttgttattggcagtaaaaaagcaggggtattgcagactatccttggcgcagtaatcatagctgctgccgttatgcttggacctgccggcgccggtgctttagccgcaggtactgcgtggaatgtcgggttggctggcggcgccatgatgctcggcggcgtcgttcagatgctttccccacagccagctggcctggcacgaaaagaatccgctgacaataaagcgtcctacgcctttgggggcgtgacgaacactgcctctcaggggtacccggtccctttgctttatggcaaacgccgaattggcggcgccattatatctgccggtatttacgtagaagaccagcaataagttttattcagtaaaccatctaattcaggccaccttgcggtggctttttttatgggcgtaatatggcaaataacataattaaagggcgcaagggtggcggctcaaagcagcgtacaccgacggaacagccggatgatttacagtccgttgcgaaagccaaaattctgctcgcattaggtgagggtgaatttgcaggtggtttaaccggtaaagatatttatcttgatggcaccccgcttgaaaatgctgatggttcgcaaaacttcagtggcgtgtcctgggaatttcgacccggcacgcaggctcagacttatattcagggtattcccggcactgaaaatgaaatcagtgtgggaacggaagtttccagcaagacagcctggacccatacctttactaatacccagctttctgccgttcgtgtccgcctgaaatggccgtccctgatgaaacaggaagatgacggcgacgtggtgggcaataccgtcgagtatgcgattgacctgcagaccgatggcggcgcctggcagacggtactggaaaccgctgtcacgggtaaagccacctccggctatgagcggagccatcgtatcgatctgccccaggccggcagtacctggacgctacgcctgcgtaaaatcactccggatgcgaacagtgtcaaagtcggcgacgtgatgacgctgcagagctacaccgaagtgattgatgccaaactgcgttatcccaacaccgcgttgctttatatcgagttcgatgccagccagttgaatggcagcattccgcaaatttcctgtgagccgcgtgggcgcgtgattcgtgtgccggataactacaatccggaaactcgtgaatataccggggtctggaccggcgggtttaaatgggcctggacggataacccggcctggatctattacgacattgttacagctgaccgttttggtctcggtaatcgtctgagcagcgccaatatttcgaaatggacgctgtaccagattgcacagtactgcgatcagctggttcctgacgggcgtggtggtgacggcatggagccgcgctatacctgtaacgtctatgttcaggaacgcaacgatgcttacaccgtgctgcgagactttgccgccattttccggggcatgacctgctggaacggtgagcagattgttgtgcaggctgatatgccgcgtgatgtcgattttacctatacgcgcgccaatattatcggcaaaccccgttattcgagcagcagcagccaggttcggtacaccaacgccctggtttcctggtctgatccggataatgcttatgctgatgcgatggagccggcgtttatcccggaactggtttcccgctacagttttaaccagctcgaactgaccgcgattggctgtacgcgccagagcgaagcccaccgtaaggggttgtggggcatactgaccaacaacaaagaccgggtcgttgagtttgatgtggggctggacggtcgcattcctcaacccggttatatcattgccctggcggatgagttgctggccggacgggtcaacggcgggcgaatcagcgcggtgaatggccgggtgattactctggatcgtgatgtggatgccaaacctggcgaccgtctccagctaaacctgccatccggtatctcacagagccggaccattcaggctgttaacggacgccggcagattacggtcacaacggcgtacagtgagacaccagaacgggaatgcgtctgggccgttgaatccgatgacctcttcctgcagcagtaccgggttacaggggtaaaagagaacagcgatgccaccctcacgatcaccggcgtggcacatgacccggataaattcgcccgcatcgataccggcgctattatcgaccagcgcccggttagcgtattgccggcgggcaaccagtcacctcctgacgatattgtcatcacatcccgctcggtcgtgaatcaggggatcagcgtcgaaacgatgcaggttaactggtcagctgtcagcggcgctattgcctacgaggcacagtggcgccgtaacgacgggaactggattaatgtgccgcgcagctcgaccacctcgtttgaggtcagcggcatttatgccggtcgttatctggttcgcgtccgcgcgatcaatgcggcggagatctcgagcggctgggcgtattccgaagagaaaaccctgaccggcaaggtcggcgagccgctggcaccgctggcgctggcaacccgttctctggttcatggggtccaggttagctgggagttcccgaccggctccggggatacgctgcgcacggaactacagtacagcaaaaatcaggacggcagtgcgccgatgccgttatcagacgtggcctatccggggaaaagctatcagcagatgggcctcagtatgggcgcagaattctggtatcgggcgcgtcttgtggatcgtcttggcaatgaaagcccgtggaccggctgggtccaggggatggccagcgataactttgatgactactacgaaaacctgaccgacgcgatcaaggatacggctgcctgggaggaaacgcagcgcaccattagcgaaacacaggaaggtatccgcaatacgcagcaggaactggagcagaccgctgaagctctgcgtaaggaagccgaagaccaggcgaagcaggtcagccaggatattgatgcatcggcgaaaagcatcacggctgatgttgacgggaagatctccgccgtgaataaaaccatcacggatgagatcacctcggtcaatgaggctctcgattctggtctggctcaggcaaacaaaggcgttcaggaggcaaaatccgccgtcgcagatgcgaacaagcagatcgcaactgtgaacaagtcgctgaccgacagcatcacccaggtaagacagtcagtcaccgatacggctgcggaaatcaacgccaccatcgacctggagattgccagggtcagcaaaacgctggccgacggcgatgccgcattgaatgcgcagataaagactgccgaaaatggcctgaagcagtcgctgtctcaggtcaacaccacgctgaccaatgcggtgaagcaggagaccgcggatcgtatcgccgatgttaacgcgaaggcgtcacaggccgctgatgaactgctggcggcaacgcaggggattgaggcgagtatcgagagcctgactcaggtgatgaagaccgccgatgaaaatctggcgcgggaaatgtccagcctcgctgccggcgctaatatccagttcgattcgcaggttatctggcatttcaacaatcagacgaccgagggctggaccggcagcgccggcgtaccgggtgtgtcacaggatggctggttacgcccggcggacagcgccaccgatccgtacattacctctcctggcgggctggctgtcgatggtgcggcgtaccgtttcatcatgctgcgctttcgtaaaaccggcaaaccagtttgggcaggtgagatccgctgggtgtctgccggcgaaaacttcaataacacgaagcgatacattgttgctgagccggaatatgccgatggggtggcaaccctgacggtgcgtgatattccgtggacagggaacattgatcgtattcgcctggacctgacgaaccagcaggatgccagcaactttatcgaattcgactggatcgccgttggccggccagcacccggcgccagtacggcggctctgcaggatgtgcgcagtacgctgagtaacgcgctgaccgccgaagcacaggcacgcagcacgctggcggcgcagatgcgtggctcctatgatgggagcgatctggagaaagtcacctccgggctgctgtaccaggaaaaaaccgcgcgcgttaccgccatctcggcggaagttaaggccagagagtccctgcagacgcagtttaacgacaacaaagctgctgtttctggtgaactgagttctctgacgacagagcagagcgcgcaggcgagccgtatcggtggcctggaaaccagcctcgggaaaaaagccgatgcggccgcgctgacgtccctgacgcagaaagttgagcaacagggcgccacgctgacatctcagggcgccgcgttaacatcgctcactaaccgggttggccagacggaaacgggcctggctggtacgaatgaggcactgagcgggctgcagtctgttgttacccagcagggcgacaggataaccagccagggtcagtccatcacgaaactgacgagcgatttgggcacgacaaatgccgcgctggcgaagaaagccgaagcggctgcggtcactgccttaacgcagcaggtagagcaaaacggacgggatattcgcagcaatactgacagcatcaccagcctgtcgaatcaactggtcaatggccagccgaatcgctggtcccgtcgactctatccggtgcagctggctaacgccgggacagtcccgtcattcagcgatgttcgcgctgtggcaccaacggtagtggatgaggtggccgacgcggccaaactggactttacgtccgccggcagctatctgatcgcgctgtattcctgccaggtgaaagtggccgcagataccaccatcacactggcgcccggcgccagggtttttgatgataccggcgccatatttgtgaatggggttcaggtcgcctggggtaacgccagctggaataccgtcagttttgaactgaaagccggctggaacaccgttgagtttctggtgaatcagtggaccggccaggcgtatatcaacctgggcctgaagctgtcagacaaggttgccgagatgtactccggtctcggggtttccgcgctggcaaacgcagccggcgtgctcagctcgaatgtcagccagattggcaacgaggtggtcagcaattcgcagagcatcacccaactccggaatgcgctgacgcagacagacgcgaacgtggccagcaaagcggatcagacggcgatgaactcgctaaccggacgagtggagaagacggaatccgggctgacggctgctaacgccaacattacctcgctgaaatccgctgtacgggccggaaacgcatcaggcggagatttaattcccaacccgacatttgacccggcttacgaccagatggggtttagcgtcgtatccacgacggctgaggaggtccctcctagctgcccgtatggttatgcggccagaattgccagccgggatcaccatcctaactttgccgcgttcccggccacgcttaacgatgtgattgagatcagcgcactggttgcctgcggcgccggcacggcgaattttaatctgtatgttggcaccgccgttcggccagatacgagcaccggtgcgccactcatggcggggggcggaaaatcaccttccgcgacctggcagagaaccacctggcgcttcaaggtcacgcaggcgatggtagacaggggttatatccgcccgttcctgcagatctcgcagaacagcccgtatggcaccgtatggttcgttacggactggcatatgcgaaatgtgacagcggcgcaaaaggttcaggatactgcggatgccacggcggcggcggttgactcgctgaccaccaccgtgacgcaacagggtaatctgctgacctcgaccggcaaccggacaacccagctggaaaacgggctggccaccaccaatgccgcagtggccaaaaaggctgatgcgacagcggtgcaggatttgaccaataccgtcacacagctgggcaacgatctgactgctgcgaacagcgccatcacgaaactgaccggaaatctggcgaataccgataaagcgctggcgcagaaagccgatgcgactgcgctggccacgctcgacacgaaagtgacgcagcagggtaaaacgctggagagccagagcaattcgctgacgaatctgtcgaacagtctctcgcaagttgcggcagatatcgatgccagcggtcagataccgggtaacctggtcgtgaatccctcatttgaacgcgggctggatggttataccgggcggtcaaccgcgaccagtgtggtggaggtttccgctcctcacagcgggacgcgggcgctgaaggttgatccggggagcgtgtctccggggcaatacatcccgtttgttcaggggcgaacctatgaaatcggggtgtgggtcaaggaacccggagcgacgacggataatggcgcggggaacaacaagttgcggatcggtaactctgccggccagccggtctttgagcgtccgtacaacagcggcacggtggggacaaactggaccctggtttccggtcgctggaaagcgacggagacagccagcctgccggtgacgctgagcaactatctgattagtggcagccgctacttcgatgatttttacgtcactgacgttaccgaccgggtggacatcgatgccaccgccggcgccgttaccggactgacgagccgggtcagcacagcggaaggggctatcacctcgcaaagccagcagctgacgaacctgcagaacagcctgaacacgaccaacagcaatgtgtcgaagaaggccgatgcaacggcactgacttcggtcgataaccgggtgacagaggcggaagggaaactgaccacacagagccagcagctgacaaatctggcgaatgtgctgacggccacccgcaacgctggcgacaacctgatcccgaactttgattttctacagggcagcactgcctgggatattcagtatccagccggtgtgacttttggcgatttcggggacgggaaagcgggggtccggctgaaccggacgactaacaccagtccggggatcttctccaacaacaacaagccggtgccgctgaatggccagcgcaagtaccgcgtggtggtgaaggccaaaggtgtttccggcgcgatgagtctgctgatccgtcgccagaacaaaatcggccagacggacagtacgtatgaggataaaacggtcacgctgaccactgactggcaaaccatcacctgggaaaccggattgacggctgccggcgcggacgggcagaacttcaaactttattctcatccgacaaacggtgaaatctggctcgattccgtccgggtttttgatatcaccgatgaaaccaacatcaaggcgaccagcgatgctgtttcgtctctgaccgggacggtgacgaaccaggggaacaccctgacatcacaggggcaatccatcacggcgctgaataacgcgctggaaggggtcaaaggcgatgtggcgaagaaggctgatgcgtcggcggtcagttcactgaccaaccgggttacccagactgaaaaggatatccgtagccaggccgacagcctgaccaggctgaatacatcgctgaagcaacaggcaacacggggagccaatgtactgccggacggcagttttgaatcctatgccgtcggcgatgttctcagtaatgcccgcgctgttatcaccagtgaagctgcgcacagcgggaccaaaagcctgcgtgttacgcgcagtacggagtacaacccgaacgcgacggataataacgatacccatatcttttctggtatgcaggttcgcgataatgcggtctattacgtggaggcgtgggttaagttgccggctggctcgaccgccgatccgaccgtttatatggtgctaggattttccttccaggattctgccaatggctggtcgtggcctggcctgaacgtgaaagtctccgagttgtcggtggacaactggacaaaggtcagtggctatctgaccaacaaccgaaccgcactgaaacaggcaatggtgaggatctccatcccgaatacaccaaaagttcgcctgggtgacgccttcctgattgatgatctgatcatcactgacgtgaccgatgcgaaagcggcgctcgatgccgccgatgcgaatgcgcaggcgctttccagtctgtccgcgtcagtcacgcagaacgggaagaatattacgtctcagggcagcgcgatcacgaagctgcagtcggatgtgacgcaacttggtaaggatatcagcggcaaggccgatgccagcgcgctgacgaatctgacgacccgcgtgacggctaccgaaggcagcctgaaatcgcagggagacagcctgaccaacctgcagaacagcctgaacacgactaacagcaatgtggcgaagaaggctgatgcaacggcgctgcagagcctgcagaacaccgttgaacagcatggcagggatctgaccacgcaaagcagcgcgctgacgaacctggaaaacaacttttcctccctggccgttggcgggaccaaccttatccgcaatgcggacacactggagggatggagcagccgccacgccacagagacgtatctgggcgaccgcgtggcctacacccggctggcgaaaggtgcatccggttatatccagctggatgaacagacgctggatgttaccgggcgtactgaatttgtattcagcttctatgcgaaaggtgcctataacggacaggaaatggcgagttatttttataacccgtcgaacactaccaccacggaaaccagccagggggttaaaggcggggccggtgacggcaaggcggtcacgaaactgaccaccgcatgggcgcgttactgggtgaaatgggttattcctgccaccagtggcaccaaacggctgattgccgcgcgtctggaaagcgcgacgtctgccgacaaagaagtctggctctgtcgccctcagctggaaaccgggaccgtgatgactgactggtcaccgagtccggatgatgcggccagcggtattaccgcgaacacatcggccattaacagcctcaccagtcgggtgacgaatgccgaggggcaactgaccgcgcagtctcagagcatcacgaatctgcagaacagcctgaacaccaccaacaacaacgtggcacaaaaggccagcgcgcagtcggtgagtgatctcaccagccgggtcaccagtgcggaaggcaaaatcacctcccaggggcaggctatcacgaagctgcagggcgatttgagcagcaccaccgataaggtcaacaccaaagcggatcagacggcgcttaacgcgctgactggccgggtggagaaaaccgaggcaggcctcacggcagccaacagcaacatcgtcagcctgacggcggcggtgaacgccgggaatgctgccggggatgattacatcccaaacccgtcatttgatccggcgtatgaccgcatgggttatgacgtggtggagaccactgctgcaggtgtgccggctgactgcccgttcaggtatgccgtccggctggccgggcgagaccatgtgccaaaaatcaacaacatcgctgtgacgccgggcgacgtttacgaaatgtctgctctggtagcgtgtggtaccggcagcgctgactttaatttctacatcggtcgggccaccactgctactggtggtattggggcgagagcgtccgggggaaacaccaagaccaccaccgcgtggaaacgagccacctggcgctttactgtgccggcagacacgaacttcctgcgaccgttcctgcaggttaatcagagcagcccgttcggcactgtctggtacgctgccgactggcatatgcgtaacgtgacggcggcgaacagtgcgcagaaaaccgcagatgcgaccgcaaaagcggtggattcactgaccaccacggttagccagcagggcgatacgctcagcagcatcggcacgcggaccacctcgctggagaacagcctccggtcgacaaacgatacggtgagtaaaaaggctgacacgacagcggtgacgcagctgcagggcacggtgacgcagcaggggaatgacatcgcggcagccaacagcgcgctgacaaaactcagcagcgatctggccacgacgaatgcgaatgtgaacaaaaaagcggacgcaagcgcgatgaacaccctgcagaaccaggtcactgagcagggcaaaacactcagtgcgcaaggggattctctaacgcaacttagtaacagcctgagccagacggcagcggatattgacgccagcgggaaaatgccgggcaacctcattgtcaacggcagttttgagcgcggcgcggcgggctttaccggctggagcagtaccgcgacggtggccgatttacaggttccgcattcgggtaacaaggcgctgaaaatgtccgccggccagtcgaacctggtcgggcaggaaatcagtatcacgcagggtcgtacctaccgcatgggggtatgggcgaagcaggacccgggaaccacgattaaagatgcgggtaacacgaagtttcgtgtggccgacagcactggcctgctggtcggctcaaactacggaccgtttagttctggctggcaactggtaacgtttgactggaaagccacgaagaccacgacggccagtttccagctgacgaccttcctcagcgcgggggcaatgtatttcgatgatttccatgtcctcgatgttacggatgaaaaggatatcgcagctaatgccggggccatttctcagatgaatacccgcgtcaccgctgctgaaggggctatcaccacccaggcgcagcagctgacgaaactcagcggcgatctggccgtcacgaatgcggcggtcagtaagaaggccgagcaaagcgctgtcaccgggttgaccacccggatgacgtctgccgagggtaaactggattcgcagtcgcagcagctcaccagtctgcagaacagcctgaccacgatgaatactgagctgggtaaaaaggctgacacgtccgcggtgagttcactgaccggtcgcgtaagccaggtggaaaacaccatcaccagccagtcgcagagcatcacgtcgctgaccagcaccatcaataccatccgcactcagggagctaatccgtgggttgacggtacgtttgaaagctacagcgatggccaggtgctgggcgggaacggcacagccgttgtggtggcgtctcagaaattcaccggcaataagagcctgcaggtgagtcgaggagcgaacaataacggcaacagcgataaacagcttgggagctggcagtcagtccgtgaggatgcgaagttccggtttgagttctgggctatgatgccggcggatcaggcgccatcctccgggtggacaacgctggtcggcattaactcactgaatgctgccggtcaaaactcctggcagtcggcggtcactgtcagcgaagccgctcttggtgcgcgtgataagtgggtgaaatttacgggtattgccagtaacaacgggggtgggagaacacgcgcagtggtctggatctctacccgtggcgcctccggcagcggcacccccggttattcgctgtatatcgacgatctggttatcacggatgttaccgatgcgaaagctgcacaggatgcctctgacgcgacggcgagtgccgtgagcggtctgacggctcgcgtaacggatgctgaagggaaaatcaccgcccaggcgcagcagcagacggcactggccacgaaagtggataatgccaactcccgcgtcgataacatggcgaagacgctaagcgacagccagagcacacaggccagcctgaatacctcgcttcagtcgcagattgacgcgcaggcggccgccaacatcaaaaaccagacgacgctggacaacacgattaaatcggtgaccagtatcaccagtacccagcagacgcatgcaacggcactggaggcgctggcaacgcagcagacgaccctgacatccagtgtcggggatctcagcgcttccgttcagaacaccgccaaaaccgtggcggatgtgaatggtacggtgagttcgctgtggtcgatgaaggttgagacggttaacgggaagaatgttggcgcggggattacgctgggcagcaatggtgaaacgagcgacatgatcctctacgctgaccgcttctcgctgtttaaccgtaataatgcgacggctgttccggtgatggttgccgaaggcaatgagctgtatatcgatacggcacgtatcaaaaacagttccctgacctcaaccaaaatcgcggacggttccatcacgaacgcgaagatcggcaacgagatccgctcgaatgactttgttgacgggtcacgcggctggcgtatcgccaaggatggctcttcgcagttcaacaacgtgatcgttcgcggtgcggtttatgcgactgacggctggttccaggggacggtatatgcgagccacatcgagggcgacatcgggtcatttgcgatcaacatcgctcagcaccgcacgcgcaaggtgccgaaggctacatggcagtggtttgagctggcccggttccggcggcagaatttcgaccaggtgatcaatattcgcggtggactcctccagacggatagcatcactatcgacggcggcgcgaaactcagagcggggatgtcctacgcgccaggggctgacggcggactgaatcctggctatctgtcgtatgcaatgcttcttcgtggcacaggcgctacgtctggtggcggcagtatggagctaggcattgagcttatgtatgaaacaggtggagcaacacgcctgttaacggcgcaagagtcaatgaacgtagacaacatgtcatttgtcgtccctgccggtactggcgacgctgttctgcgatatggctgttacctggaccgtaacggacagatggtattaaccatcctctcaagattcgacgccttcgccgcgcgcaataacaacgtaattcgcggttcatcaacctgataacaatatatggccccgcaaggggccttttctttttccagggaaaaccatccaggaggaactttattatggcgatgtatgaagtcggtaccgtcacgggtgccgcgtcgcaggcacgggtgacaggtgcgacaacaaaatggtcacaggaggcgctggggatactgcccgggtcgattctagtggtctaccgcagcggtagtgctgacctgtatgcgatcaaatccgtggacagcgacacgcaactgacgctgacccggaatatcaccaccgcattttccggtgccagttacggcattattaccgctgaaaccgccagcacctcgtcgtttgctaaccagctggccagcgcgtttgcattctggcgtagtgtagtggagggctggtcgatggccctgaccggcagcggcaatatcaccctgactgacccgatcacaggaaagcaggtgaccgtgccggcgatagccgggatggcgaaggcctcggatcttaacgcgctggcaaaactcaccggaggaaacaaactcgacggctcgcaggttataaccagcgataatgccggttttatactcggtaagaactcagatctggctctgctcaaaaaacaggggcaaggcgggacaattgccgttggctcgggaacaccgtttagggttcagcgttcaagagcgaccactgtatcaccggcagacacctttgatgacatcctcgttattggcaccaataaccagacgacgttgcccggagatttggttgtcggtggtggtttcgataatacggcaaagggcaagctgtattcccaggcgttagagctatcgatgagcacgccatacatcgactttcatttcaacggcagcatcgccgactttaccgcccgcattatccaggaccggcaaaacagactaaatattcagggcaatgccagcttgttagttaccgatggcaatttaaccgctggctcaacaatgcccggcaatatcgcagtcggccagcaggtcaccgccgcacctgtgcggtctcagatgttgagaagaggcgcttacggcgacccggacggcgcatacgtgcaaatgtacatggaggagaaggtcggcactgagcaccggatcgtgctgtactctgacggtttcggaagaaccgatgcctggctatttcggcctggcggcacaatcaccaccggcaaaggtgacgtcatgactaccggttctgacgttcgtctgaaagacgggtttacagaacctcaggaaggggcctccaggcgcattaatgcgctgggggtatgcgagttcaatatgaaaggcgaaacgcgccggaggcgtggttttatcgctcagcaggctgaaaaagctgatgacctgtatactttcctcggcatcgagcaggagatcgatggcgaaaaattcagggtgatgaatgttgattacacggccatcatcgccgatttggtaacagtggtgcaggatttgattaggcgagttgacgcactagaaagttgaggagcataaaaaatcccccggaggcacttgccgggggcaactgtaacgacattaattgctgtgtacatcacagaataatttggagtaaacgataagtaagttcaagtaaatttttactggtcagatgttgtgtcgttgtttaataatctaccaaaattaataatgcaatagtgataaatcctgttgggttttcatgtttaaggatataaccctaaagtattgcctttcattagatttaaaacgtacagatagattcaagaaaatggatgcaaaatgttattattgatacgtttatcaataattgaagtgcaatcttgtaattttcacatccatgttataactttgtaatgcagggcggttttatcttgtaatttagtggtttaaagtgatagcggctcttagtgatttataataggctttctatgttaacaaaattcccagatgaaaaatacatatctgacagaaattcatcgtttattaaaagagtatatttcttacgtcagataggtgtcgttctttgctttcttcctatatattcagtcctccaggaacagtcacatcaaaaaataacgatagccctgttaattttgaatgcactcatctggccatcggttgcttatctggcaagcatgatgtcgaaggatatgctgagtactgaaaaaaagaatatggtactcgattcattctgggctggtatctggatagccgtaatgcaagctagcccaattccatcattattcataatctccgttcaaatagctgatcgctatgctgctggtggatggaaaattttaaaaccagcattaacgtggatgatgattagtttcgtgatagtttggttagcaaatgatttcagatatactatagaattcagcacccgaacggtattgctttctttaccgttggcaacctgttatcccatagtgttgagtgttgtttcaaggcacttatctataaagttgaggaaaagaagggagttactggaaaaacaggcgctgatggatcctagcttagatctgccaaatcgccgattttttgagcaaaaaatggaaagtgcttttcgtgcgacgcgtaaaaagagaattcattcttatcttatgctcattgatgttgataattttaaaaaaattaatgatacatatggtcatgaagtaggtgatgcggtgttatctcgtatatcaacaatattacgagagtgcgctggcgagaaggatgtgccagcaagatttggtggcgatgagttggctattattgttaacaacagtaatagcaagcttgttatagccatggttgatataattcaggaaaaaattaaagatctttcattgccttctcataaagatatgtactgtactgtcagtatcggtatttcttgtgcagaaaataaagaatcaattatcgagtggatcaaagaggctgatcaaatgctatatgaagttaaacgtaatgggaagaatggatattgcatgccgaataattgaagatgaaatgatttattttcttatgatgttatacctataaatgtttaagatggtttattatcggcattatcatcgcagataaatttcttcggaacctcagacaccttctcaactaacgtttgatatctggcactaaattattagtatttaataacacattgattttattgtgatttataatgaaatcatgtttctatttttacctttcacttcacttcatttgatttgaattaccgatcaatttgtggtgtgtgataggtttcgcctattgttcgatcatgatcgatcattttaaactatttctctttcatttataattatgacacgattaggaatattcttagttccggtgtttttttatgttaaagaacagtgtggaaatagaatcctgcaggtttgttttagaaccatcttacaaaaaagatggttctattcattcttgggaaattctcacgaaaagtgttaaaaaaaagaacgctaatgattatcatgctaatgaaggtcttttttgcttcagttcgctaagcgataaagaaaaaatcgatgtgtttaagagacagatattgacaattgaaaagcttgatgcatcaaaattgaagttcaagccagtttcgttgaatgttgacagtcttattagcgattgtattttgaacgataaatatattggtgattacttaaaaaaccaaaaaaacattgcttttgagattaacgagtattttcatgaattcaatactaaatgctgtatggttgacttaaagtgtctttcaaaattgtgtccagtatggctggatgattttggaaggggcttaacaagtttaacaattattgatatgtttaattttgaatgtataaaaattgataaagattatttctgggaaatacagagtgagagcgaattctttaaaagaataaataaaataaaatcatactgcaatttcgtgattgttgagggagttgagacaatagaacaaaaaaataaagtacattctgttgttgattgcgcttgccagggaaggttgtggatgagtgattactattatgttgagatttaaaataaatgacaacaaaagatgataaatgtccattttgtggtgcagttttaattaatgaggaccactgccacagctgccatgcatttaagattaaaggctatgtatcaagagacgcacgcaagacaattaatttgatatctatctgcacatctttactggtagcgctctttgggatcttggttgtgtttctggtatctttcggtatcgggacatatattgctatcattgcgttttctcttattttatattttattatgaaaaggatcctgcatataaaagaagaacaaaaagggaagatggtttggaaaagagcaatcattacatggtaggtagtaattaaataatataatggcgctgcttgttccaatgcaagcctcggattccgaggcttttttattttcttttcaaatcatgagttataacaccggagatatttaacccgactcacagggagtaagtattattggctaataattcactatccagatgagctgaaaaactcaaagccagttatcaaaactgaaaatatactaatgaatttcaataggttagggcttaggttaaacacattaataacgtatcaaaaatacctatttttctatttaaatcaacaagtaatgatgttattggttaactactgctgcgccacctgcagtggttcgaagcggcagacctgatcgttaaaggcaccgaaggcgcaatcgccgctaagaccgtgacctatgactttgaacgtctgatggaaggcgctaagctgctgaaatgttcagagtttggcgacgcgattatcgcgaacatgtaatccagtctctgggttaaacaaaaacgggagccgatgggttcccgtttttttattctccggggggaatcgcgtccgttacgcgggtctaaaaggaggggtatagcggtctctcgtccagttttacgcggtggtgtgactgtcgactcaatccgccttcaacatcccaaagctcacaattctcgaccgccccagctcttttgcccggtagagcgcagcgtcagccgcgcgcagcaggctatcgctttgcgtatgctgcgggtagctggcgatgccgatggacacatcgacctgaccaatttcagccaggccatagcgtagcgtcagcagttggacgctgtgatagatgtcggtcgcgcaggccatcgcggcctcttcatcggttccgcccagcaataccaggaactcttcgccgccatagcggaaggccatcccaatatcgcgcaccgcacgttgaataatcgccgcgacgtttttaatgaccagatcgcccgcttcgtgaccataactatcattaatcgccttaaagtgatcgatatcgatcatcaggcagctcagcggcgtaccgttgcgtaccgccagactcatttgagtatgcagagcgtcatccaggtggtggcggttacgcaggccggttaatgaatcaaacagcgccttttccagcagcgcgttgcgtaaacgctggttcgccagcgccagacccagggcttcggccatcagttcaagataggcgcgggacggggcggtcgcggaggtgacgttgctgaaggagagcagaccaatcgcttctccttgcgcaatcagcggcacgcatagcgaccgttgagcctgcgattccgacaggtgatagcaggcgatatccggctcaccgttgaccggcggatggctcagcccgcgccgcacggcccagcagttatccggatggaagacgtcggcttcaagcggcggagaaagccactgcgccacgcagcgcatctgccagggatcggtatcgagaatatacagccggcccgggatctccggggcgatatttggcgcgaacagttcggcaaccttgatcacatcctcgaacgattcgcagccctgcaagcgctgggtcatcctcgccagcagctcccggaccgcccagtccgcatcgcgctcttgttccagccgctgccgcgccagcccgttctcgcgaaagatgcgaatggcctgggccatatcgccaatttcatcaatctgggtaaactgcggcgtctcaaccgcataatcctgcgatgccagccgctgcaccacgtcgctcaggcgaacgacgggatagagcacccgccgcttaagaataaaccccagcacaaacaggaacattagcgcggtgagcccaaccatgatctcagaaagcgtacgccagatccgtgacttctccgtagcctcggcaatggttttattcacccggccttcgagcatcaggcgaaagtgatcgagctgcgtctggacccgctcgagctcctgctcataggcagcgccgtaaagcaggctgaccgccgctttttcttctcccctggcaacctgcgccagcgccgtttgctgctcatcctgaagttcatcggctatctgtaaaccctcgcgcagcagcgccagctcttcagcggttgcgccattgtctttcagcttttccagacgatgttcaatggcggcggtggcctgggcttgctgccggtactcctgcagcacatcctgatttttttgaatgatgtaaagtcgcgcgagatcggaaagctcccaggcgccgctttctacttcttcgcttagctggtcaaacgcctggcgttgttcgacggcgcggcgttcggcattatccgcacttgaggccatcagcatggcgatgcctgaggcgagggtcagggcgacggtgatcccgtaggcccagttagtcatggtggcgattctcaccggatattccttgcgtgcagatgaattaattatttttttatcgtcacactccggcttcaccggaaaaaaagcggtgattacgggtgcagcgtgtgagtaataatagcgtgcagcgcttcggcatggtgatgcaaaatgcggtacacgtctttatccagcgcgccatttataacatcactctctatcagctgtaacgcttgctgacggctcattccggggcgataggggcggtcttcggtaagcgcggtgaaaatatccgcgatggcgataatccgatccgggagctgcaggtaatgctcattgagatgaagcggatagccgctgccatccagcttttcatgatgattcgcggcccagttaattatttcgccgagttcgctgaaggtgctaagaatttcgccggtcatatagctatgttcccgcacctgaagcagctcttcgtcattcagttcgccctgtttctccaggattttcagcggaatgtgtactttgccaatatcgtgtaaatagccggcaatctcaattttcttacactccatctccggcagattcatataagcggcgagggtgcgcgaaattcgcccgaccttcagactatggctggcggtgaagctgctgtaggtatcgacgattttggcaattaacaggcagatatctttcagaccgtcgatatcgatataaacatggttgatagggccgatgatctccagcattcgctgaatatgtccgggattgaggtgcagccaaaaatgctctttttgtgcgagctggcacaaagtctggcacagcggcggatctatcgcctggtaaagcgcgcgaaatttaccaataatcatatcggtttgaaaggttgtcgcgtgcttatcgccagcaagcaggcgttcaaacacgtcggcgaaatagacgatatgctgttcgaggctgcctttgtggtgtgggctaaaatggtgatcgcggataatcggcaggatgggggccagggtcgctaacccggccagcatttctgctccccggtgctgatgcggatcgttgaggttatcgatagcgttcagcgaggagaacactcgtttatcgcccagaacgccaatgtcgtgcagcagcgcggcgcaaaagatcgtctgctgctgctgacgcgagagccctgacgcctgcgcaagctccagcgcgatcagcgccgttcgttgcatatgcaggtgtaattcagggttaataatttgtatgacgcgggtggtaagcatcaatgctgattttaaggcgatattatgcatcgtttttctccatcgcattacccgcaccgttttgctctatttcgttgatagcgatgccgacatgacaaaatagattgaataagtccattcgggtttcgcatttttatcctgcccatttttagcgcgtccctgcaccaaagtagcgctccgggcgaagtaaaaatccttttttgtccgatagttaatcatttttaccgagtaaaatacattaaatcctggcaagccgtttgcattctctctgcgcgaatttatttaatatctattttgggatgagtcatgatgaattttagagcattactggcaattacgttactggcgataagcgctttcgcctcgagtgagacgcgtctgccgcatatcgtaatcctcgcgaccggagggacgattgccggttcagcggccagcaatacccagactaccgggtacaaagccggcgcgattggcgtacagacgctgattaatgccgtgcctgagatgagcaaagtcgcacgcgttgacggcgagcaggtcgctaatatcggcagcgaaaatatgaccagcgacatcattctcaaactgtcaaagcgcgtcaatgaactgctggcccgcgatgatgtggacggcgttgtgattacccatggtaccgacaccctggacgagacgccttatttcctcaacctgacggtaaaaagcaataagccggtcgttttcacggcggcaatgcgtccggccacggctatcagcgccgacggtccgatgaatctgctggaagcggtgaccgtggcggccgatccggaagcgaagggccgcggcgtaatggtagtgcttaatgaccgcatcggcgcggcgcgttttgtcactaagaccaacgccacgacgctggataccttcaaggcgccggaagagggctatctgggcgttatcgtgagcggcaaaccgcagttcgaaactcgcgtggataaaattcacaccgtgcgttcggtttttgacgtccgcaatcttaacgcgctaccgaaagtggtcattatttatggctatcaggatgaccctgaatatatgtatgacgcggcgatcgcgcaccatgccgacgggattatctatgcgggcaccggcgcggggtcggtctccgtacgcagcgcggcggggatcgaaaaggcggaaaaagccggtatcgtggtggttcgcgcctcgcgtaccggcagcggcgtcgtgccggttgatgacggccagcctgggctggtagccgactcgctcaacccggcaaaagcgcgcatcctgctgatgacggcgctgacgcaaacgaaaaatccgcaggtgatccagcagtacttccacacctactgatcaacttcgggtagggcgcagcgcgccttacccgggttatttcaccacgcacatcgggcgctgcgacaccggctccgggtgaatctccgcctccaggtgaaaaatctcccgcagcatctccggcgtcagtaccgtttccgccaggccctgagcctgcacctggcccccttcaagcaccaccagatggtcgcagtagcggctggcctggttcaggtcgtgcagtacggtgaccacggtcttgcccatcgtctgcagctcgcgcatcagcgtcattagcgccacctgatgatgaatatccagccaggtcgttggctcatcgagcagcaccagcggcgtatcctgcgccagcagcagcgccagaaaagcccgctgccgctggccgccggaaagggcggtcagcggtcgttccgccagcgcagcgatgccggttcgttgtagcgcgctgtcgacctgctgtcgatcctgcgcggaaagccgcccccacagcggtagccacggactccggccgtagccgaccagctcgcgtacggtgatgccttccggaacgtgatgctgctgcggcagcagcgccagtcgccgcgctagctgacgggcggagaggcggtttaaggggacatcatcgagccagacctcgccggcgatgggcgtcaggaggcgagagaaacacttcagcagcgttgatttaccgcagccgtttggccccagcagcgcggtaattttcccgcccggtagcgtcagatcgagattgttgataacgcgcttgccgccatagccagcggttagcttttctattcgcagttccatttaacgcattctcacaagaagccagataaaccagggggcgccgataatcgccgtcagcacgcctgccggcagctcaagcggcggatgcagcgttcgcgccagcagatcggcgagcagcagaaccagtccgcccgtgagcgcagagagcggcaataaacggcgatggcggccgccgaagaggcgacgcacaagatgcggcaccacaaggctgataaaggcgacaggaccgcagaccgcgacgccgatcgacgcgagggccaccgccagcgttaagccgtagccgttaagccagcgcacgttgacgccgagcgttcccgcgcgctcatggcctagcgccagcaggtcgagatcgcgactgagggcgaagcttaagggcagcaaaatcgccagcaggggcaggacgatgatgacgaatgcgccgtctctggcccacaggcttccggtcagccacagcagcgcgttattgatctcctgcggccgcgacagtaagaggtagtcggtcacgctggcccagcaggccgacagcgcgatgccggtcagcgccaggcgcattgggcgagaaaaaccggcaagggcgagcggtatcaccatcgccaccattccgccgataaaggccagcagcggcagccacggcaggggcagggacggtaaaaaccacagtgccgccaccgaggtcaggctcgccccgtggttaatgcccagaatgtccggcgaggccagcggattatgcacaataccctgaaccagcgccccggaaaccgccagcgcggcgccgataatcagcgccagcaccacgcgcggcaggcgatattgcataaggacgtagtgatactcgctgtccgcatgccatccgctgagcagcgctcgccacggcagcgggatcgcccccatccgcagcgagaacagggttaacagcgtgagcgcgagccataaaaacacgatgcgttgtttcacccgcgtctcctgaccagccagacaaaacagggcccgcccgccagcgccagcaccgcgcccgcgggcagttcacccggccaggccaacgctctggcgagcatatccgccagcagcataaacagggcgcccagcagggcgctgaccggcaaaaaagtacgatgatcgtgacccgcccaaaaacgcgccagatgcgggaccagcaggccaacaaaggcaatcggtccggcgacgctgacgctggcgccggtaagcagcaacacggccgcgttgataagcaggcgcaggcgcggcaaattcacccccagcgaatgggcggcggtatcgctgacgttaagcagattaagcgcgttggccagcaggaatacgccgggggtaatcagcgcgacaaaagggaaaagctgccagaactcggcccagcgcacgtgggaaacgccgcccgcaagccaggtaagaataccccaggcgcgatcttccgccagcagcagggtcattctggtcaacgccatgcatagcgccgagagagcaataccggcgaggatcaaccgttggcgatcctgctgttgacgccagccgccgccggcgctcatcaccagcagccagcttattccgccgccgcaggcggcaatcagcgccagcgaaaagcccgccagcggtgccggactgaatgcgctggtcagcgccatcgccagcgccgcgccgctattaatgccgagcagtgaaggcgatgccagcgggttatgggtaagcgtttgtaataacgcccccgacattgccagcgaggcgccgagcattaccgccaccaggctgcggggcaggcgcagattaagcaccagcgcctccgcaagcgaaggagactcaggcgccagcagggcgtgaagggcgttgagcggcgaaatcgggatgggcgaatagcagaacaggctcagccagaacaggccgctgagggccagcagcggccatccccagataaaaaacgcgcgacggaacggtttcatggcgtgatatcaaccgcccggtggtggacaattttaaccatatcgctggcaatacgctcggcggcgaagatcccgcgcatccgcgcccagctgttgctgtcgacggcggcgacctgccctttctgctcggcctgcagcattggccacagggagtcctgctgccattttttcacgatactttcactacggtaatgagcgaccagcagccattgcggattcagggccagcagctgttcgaaatttatcgccgccatcggcgcgccgccgctcggcggcggaactttcaggccaagcgccgtcagcacgctgccggtataagtttgcgttgagtgaagattaaactgctgttcgcgggaggtgccaaacagcacgctggcgccagccggcagctgtcgggaaaacgccgccattttttgccgatgcagcgccagacgctgctgcatctccttatccttacccactactttgccgataatcgccgctgactgcaggttctcctcccaggtttcattgcgcgatttcaacagcagcaccggggcaatctgcctcagggcggcgtaaattccggcatggcgactgctatcggcgacgatcagatcgggatgcagcgcgctgatggcctccagtgaaggctgggcgcgggtgcccaccgactgccagggcttcagacgtgcgcgtacgtccgccagaatacgcgatggatcgttgtcatcggccacgcctgtcgggctaacgtcaaccgccgccagcgcgtcgacaaaggagagttcaagcacgacgatacgctgcggcgttttatcaagcgtaaagcgaccgcgctcatcctgtacggtggcggcaaagagcgggcccgccagaaacagcaggctgaaaatacacagacgaacaaggttaaacattattcactccagcttgccggacagggcgcgaatagcgctgtccggcaacgctctatcatcagaacttcattgatccttgcaggtacagcgtgcgcggctgaccggcgtaaagccctttgttgttatcgtcgtacgagcgggtgtaatacgcatggtcgaagatgtttttcacccccagcgcgaggttgagattggccatctgcgggccaaagtcataggccacgcgagcgccccacagcatatagccgggaatgcggccggtgctgccatcggcgctttcggcaacggtattggcgttatcggcaaactggctcgactggaagtcgccgttgaggttaaacgtccagctgccgggcttgtaatcgacaccaaaggtgcctttgtgcttcggcgagaagggaacctggttaccgtaggtatcgcctttctcgcgaatttcagcattgacgtacgcatagctggcgtagacagagagattatcaagcgcgggtgaaagctcgccgagggcgtaacgggtttgcgcttccaggccgctatgacgcgttttaccccgggcggtgaccgtgtcattggtctggttggaatcgtactgattgttgaagttaatcaggaacagccccatctctgcggtcagcgcgccgtcgtcgtagcgggtgccgacttcccaggttcgcgctttttccggttccacattgccgctttgcacagccttgccaatctggctgtactgtacggtgccgaatgagccttctgtgttggcataaagattccagctgtcggtgaggtgataaagaacattcagcgccgggagcggggcgttatagctgacccgttcgcgggtgccgagcagattattgtcctgataagactcaatgtgctcaaagcgcatacctggcgtaatcgtccagttgccgatatccacgcgatcgtcgatataccaggcgtgggcttcggtgccggaacgggtatcgcgatcgtacgggctggcggtgctgggcagctcgccgctggtggtcgcggtgtagtaacgcatctcgtgggtcgattcgttgacgtagcgatagccgacgccgacttcgtgggcggatgggccgatcataaagctttggctgtagcgcggctcgatgccgcggacccaatattcgcgcggggagagggtaatgcgcttaccctgttccaggtagccgctgcgcagggtatgggtatagaacccctgaatattaaatttatgctgcgcatccggctggtactggtagccgaggctggcgagctggcggcgcccccaaaagcggtcataaggacgcgtggactgccagcggtcggcgttgtagtcggcgcgggagaggccgccgggcatatcggcttcgccgtcatagtattgcagcaggctgttaaaggtatggacttcgttgggcgcgtatttgcttttcagcatcacatcatcaatccgcgtggcgctgtgttcgcgccagtcgctgccccgggtgccggagtaaagcagggcggatccgaaaccgttgtccgccgtgccgccgatcgcgaggttatgcgtctctttcgggttgttttgcgaagaggtggggctgagctgcccttcaatgccgccctgaatgccaaaatcctcggggatggcgcgggtgacgaagttcaccacgccgccgacgctctgcggcccgtagcgcaccgcgccgccgccgcgcacgacatcgatggcgtccatattgccgagcgagaccggcgccagcgaaagctgcggctggccgtagggggcaaagggaaccgggataccgtccatcagcaccgtggaacggctggcaagccgcgggttgaggccacgaataccgaagttcatcgccaggtcgtgactgccggtgccggtattttccggcgcgttgacgccagggatccggttcagcacttcgcgcatcgtggcggcgccggttttggcgaaatcctcccgacggatcacgtcgcgggcgccggcgtgctcaaagacatcattttcgcgcgcgtcgccaagccagtccccgacgacggtgagggtggattctgcagtgacgggcgcgggatccagctccagggtccagacgttcttgcccagcggcttgagccgtaatccgctgccgttcagcagcctgcgtaaaccctcttcggtttcaaagctgccgtgcaggcccgggctatgcttgccgcgcgtcaggctggcgtcggcggaaagcgtgataccgctgcgggcggcatattggttcagggcgtggtctaactccccggcggtaatatcatactgcgcggcggcgaataccggcgcggcggccagccccgctagcggcagcaggcttaaacggattgccatcaccagaggcatcggtttgcgtaaaacgcgtaaaggcgtcatctcttctccaccatcgtttttggttatattcatcagataagtcgaacgagcaggggaaaagggacaatggagaatgagaattttttcgattttttttctcaggctggaacgagtgtgacccagtagcgggtgacagaccgcaatgtaatcggcagcgtttgcgcgataacctgcagaatggcatcaggatcgcccagcggaaaggtgccgctcaggcgtaaatcggccacggcgggatcgcagcgcagcaccccggagcgatagcgggcgagggtttcgaccacttcgctcagcggggcgtcgcggaaggtcagcacgccccggatccagctatcctcgtcgccgttgagcttaaccagggcggcgaagcgatcgcgggtaaaccacaggctttccccggcgttaacgcgttgggcgctgccggacggtaaaaccacttctacggcatgctgctgtaccgccagccgggtgccgccggcaaactgacggacggtgaattcggtcccgagcgcggtgagagtgccttcccgcgtttggacccggaaaggccgctgccggctgtcgtgagcggtcctgatggcgatttcgccgtagcgtaaatgaaccatgcgctgccgcgcgtcaaaacggacgtcggcggcactttcgctattcagcgtcagcagcgaaccgtcggcaagccgctgcgggcgcggtatccctttcgccgtccggtagtcggcgcggaggccctccgccagctcggactcccagagccgccagctgcctccggccgccagcaaaagcatcagccctttcagcacgtggcgacgcgccagacggctatcgtgaagagcacggctggccagcccgcccggcagttgccccatctgctgacgcaggttttctacctgctgccacgcccactgattttcgttgttttgctcataccactgctgccagcgggcctcctgctgcggactgacgcgcccatcgctgaggaccgcgtaccagtgcgaggcggaacgcagcgcctgacgacgggattcgcttagcgtcggtttcacaggccattctccagacggaacagcaggcagtgctcggtggctttcgcgatatatttcttaaccgaactgacggaaaccgccaggcgactggcgatatcggcgtaggtcagcccttcaagctgcgagagcaaaaacgcttcccgggcttttgtgttaagcccgtccagcatggcatcaatctgctgtaacagttcgagctggctctgccgtagctccggtgagggagagagctctggcggtagctgagagagcatgtcgagccaggcgcgctccagggcgttgcggcggaacaggtcgatcatcacccgtttggcaatcgtgcagagaaaagattttggatcgcgaatcgtcaacagcgactcgccggccataattcggacaaaggtgtcctgcgctacgtcgtcggcgtcatatgcggattgcagcttatgggtaagccattttttcagccagccatgatggtcgctatagagcgaggcaagcgtcagcggagaggcgatggcggaagaaggtgacatagccaggttcaggagagttgatcaatacggtatatgttaatatgagaatggttatcatttcaataaagcgcgacagggataagggccatacagacccatagtaacgataagttattgttaaatattgaatagatttttcccctcattgcatcatttctttccctttcttcttaatgaaaataaaattcattatcattattccctccttaaccttaatgttgtatttataatgcatcttatagggagtgaggagagacaaatgaacgcaagcgaaaaagccggacatacgtttttggcaagcctggggaaaacccgcttacgccccggcggcattgaagccacagagtggctatttcagcaggcgggttttaccgccgacagtaaagttctggaggtagcctgtaatatggggacaacctctattgagctggcgcagcgttttcactgcagcgtttacgccatcgatatggataaagacgcgctggcgaaagcccggcaaaatatcgttcgcgaaggtgtggatcatcgggtgatagtgatggaggcgaatgccgctcggctgccatttgccgatgcaacgtttgatatggtgataaatgaagcgatgctcaccatgtatgcggataaagccaaagagaaactggtggcggaatattttcgcgttcttaagcccggcggtcgtttgctgacgcacgatatcatgtatacgcaggatgcgctgggagaggacacccggcggcagctgcagggggtggtgaaatcccacgtcagcccgctgagcgccgccgcctggcagacgcttttccaacggaccggctttgatgccgtaagcattcatcatggaccgatgtcgctgatgtcgccgcgagggttgatgaaagatgaaggttttaaacaggcgctaaaaattgtcggcaatggcttgttgaagcgcgagaatcgtccgagatttttatctatgttgcgtttttttcaacgtcataaaaggcatttgaactttattgcctgctgttctgttaaagcaacggaggtaaaaagtctgaaatagcccaccggcgatatggataattgtcgataaatattaattattgtcaggaaagtaaaataagctgattcttattttagtcatttcgctgacactcatttttaatatttctattttatgtcagtgaggcttatggaagataaaggaatagcctgtctgcaaacgttgtgaaaaggataacagaaagcagaggctatcccgatctcatctggatgcagccgtacctcgacgcggcttcagctgcggcctgcgggttaccacagcgacgttctggttggaaaagacgcatactttatgttgaatgattagcgcgttaatcattcttgtggtggatatttgaggtttattattcacttttttatttacattttgttacaggtgtgctggtattgtgtttttttctgttgacctctttttttacttgccggagtgaatttaccaggattattattgtctgaactgctacacgtaccgcctaatgacagatgaagggactcgttttttccttaagcgttacctcatgttctaatgtttacaggaaaaaacatgtcttgcgcttttaataaaaaacttcttcatccccgtaattgggggacctggtttggcctgagcgtgctctggctcatcgtccagcttccttatcccgtcttgcatcttatcggtaccagcgccggtcgcgcatcccggcgcttcctgaaacgccgtgagcatatcgccagacgcaatctcgaactttgctttcccaccatgtcgcccgcggcgcgcgaaaagcttatcgagcagaacttcatgtcgctagggatgggtctgattgaaacagggatggcatggttctggagcgatgagcgcgttaagaaatggtttgacgtggaaggcatggtcaatctcaataatgccctgagcgagcaaaaaggcgtgatggtcgttggcgtccactttatgtcgcttgaactgggtggccgtacgatggggctgtgtcgtccgatgatggcgacctaccgtccgcacaatagcccattgatggagtgggtgcagacgcgcggtcgtttgcgctcgaacaaggcgatgattgaccgtcgtaatttatccggtctggtacatgccttaaagtcgggtgaagcggtgtggtttgcgccggatcaggactacggcccgaaggggagcgtatttgctccgttcttctcggtacagcaggcagcaacgaccaacggtacctacgtactctctcgtttgtcgggcgcgaaaatgctcaccatcagcatggtgcgtaaagcggaccgcagaggttatagcctgcacatcagcgacgtcatgagcgactatcctggcgaagataaacaggatgcggcaagctatatcaacaaggttatagagaaagagatcctgcgcgcgccggagcaatacctgtgggttcaccgccgctttaaaacccgtccgcttggcgaaacttcgctctattaagctctccgcactcgcggcgctttcaaaatggtcccggttgcgttaacgtgcgcgggatcatattttttgttgtaagcgaaggagtgcgttgtgttcgctgagtttggtgtattgaattacctgacctatctggtcggcgctatctttatcatcctggttcccggcccgaataccttttttgtcctcaagaccggcatcgcccacggcgttaagaaagggtatctggcggcggcaggcgtgtttattggcgatgcggtgctgatgtttctggcttttgccggcgtcgcgacgctcatcaagactacgccggtgctgttcaatatcgtgcgttacctgggggcgatttatctgctgtggatgggcggcaagatgctctacgcggtgttaacccagcgtgatggtcattcgtctgctgattccgagccgggcagcgcgattctcaaacgttcgctgacccttagcctgacgaatccaaaagcgattcttttttatgtctcattcttcgtgcagtttattgacgtcggcgccaaaacgcccgggctggcgttctttattctggcgctgaccctggagataatcagcttcatctatatgagctttttgatcctctccggctctttcgtcacgcgttacgtgaagacgaaaaagaagctggcgaaaatcggcaacagtatgataggccttgtgtttgtcggttttgccgcccgtctggcgacgctccagtcgtaatcgttgggggccggtacgcgggaccggccctatagtgactgtcactgcctcgtaacaaaatcccttcaattttgattgcattggtgttacatatacagccgattatcgctcagaaaaaagggaacccggatgattctgcagaaactcaccagcaataaaaacagcaagaagttctttttgtcgatcgcggcgatctttgccatcgcgcttatcgtggttgggcgcgccacctttggcggcgtggtgagtgaatacaatatgccgtattcagaatggacgacgtcaatgttcttcctgcagggggcgatggtcacggtttacagcattgtgtttacgctgctgttttccatcccgctgggtttcctctttttaggttccgaccgccgggactaatttcatgcaataaggcgaaccgaagttcgccttattatgtttccacggctatcgccagtctctgtcgtcatgatgatggtggcggtgttgatggtgatagcctgggtcgacaatacatcccgataacagcgtgcaaagcgcgagaatcaacggcaacacgatcggttttttcatttctcacttctccagttaaatccgtgcgcaaaaacgggcatgcgccatcggctgatgaggtgagtgtatgcttttaacttattgagtagatgagataattctgcaatccttgccggaaagacgcgcgaataatcctggatttaccaccagcccaattgcgtacctgccacggcgacgatggcgacaataagcataattatggtgctttttttcattacgctccgcctggtgccgcatagccgccgacaaaaaaccagcccagaaaaaccacggcgacgataaaaatagccaccggaaatagaatacccagtctcattattgagcccctgtaagtgcgagtcgtgtcgactatgatacgggatttcaccgtagattagtcaatatgaaaaaaacgtccctgacggcgagactgcttatcctgatacatcgcctcatcggcggcgcgcagcgccagttcaacgtcgatctgccaggggtcggcttcaatcaccccaaagctggcgccggggtagttaatccggtgttcgccaaggaaatagatccccgccagcgcttgacgtaacgcggcgatatactcctgctggtcggctgaatcgggacccgtaccgacaattaaaaactcatcgccgccgagacggcctacaatatcgccgctgcgcacgcgggcggccaggcgttctccgatctgaatcaaaaagctgtcgccgcacggatggccgaatcgatcgttgattgctttgaaatcatcgagatcgataaaaatcagcagcacgctgcgctgctgttcccgggcctgcgaaaactgcgcggcaagatgcttaaacagcgagcggcgattcggcaaacccgtaagctcgtcggtatacgaatgcatctccagcgcgacgttagccgcccgaagctgctgtaccagcgtctctttctcaacgtaatgggagatgaggttggcaaacagattcatcacctgctcaccctcaatgttatagggctgtcttgcccggctggtggcgcacagcgtgccgaataatgagccgtcggtcaggcgcacgggaatgctgaaaaaggtggcgatccccaaatcctgggcggcgagacacgaacgccagcgctcggcgacatcgttgctaaaaatgcagcggtcgtccagcgcgcgtttgcacagcgagtcgttccacgggacggagaacccttcggggatctgcatttcgctgctgttgtgcgcgtacataatatgctggcgctgcgcgtcgaagtcgatacgagtcaggtaggtagattccattcgggtaaccagctccagcatctcaagcagctgtcgcaccagggtttcgagggagtgttcattagcgagcgtttgcgacacgcgagcgagaataaaatcggacatgagaaatacggctcccgaatgctaatcgtcactaccagcaaatgatgctaaaaaacaatcagcgcagaattaacagagatacacaaaatttaacacatctggggggagaatacctgcatccgcggcgggaaaaaaagccccgtcgggggcgacggggaaaactcattgattatggaatgatctgttctctggtcaattcgagaacagggctactctacgatgcaaaagtgcagctaaaatggagaaaccgtggagattcagggtgaaagaccgttttaaacgattaaggaggggaaatgaaggggatgatagtcatgctgcctctggcgcttgccggatgcgcgcagagtcagccgacgcagcaagcacacccgatagggatggctaacccggcttcggtatactgccagcagctgggagggaaacaggttcctgttcaaagcccgcagggcgtgcgcaccgagtgcaagttacccagtggtgaaacgttagatgaatgggcgctctggcgccgcgatcatccggctaagtcatagcgctttcagccagtcagccagcacctgggcatggttttgccgggtgtttttcgccgcgtagagcagcgtcagcggctgctgcctggcaagcgcggccaggcgctcgccttcatcgcggtgggcttccagctcctggcgatagcgctggctaaagtgggcaaaatcaagcgtctcgccgtgaaaagccttacgcaaatcagtcgatggcgccaggattttgcaccactcatcgtaattcagcgcctctttttttattccgcgcggccacaggcggtctaccagtatccggtagccgtcgctcgcttcctgcgggtcataaacccgtttacattgaatcatcgtcactctccctctgttccatccaggcaagcagctgcggcaactgctgctcggaaaataccgttatcccgtattcgcgaagcagggcggcggcaacgccggcaccgggtttgcgctgtccgttaaaggtaccatcatagataaactgactgccgcaggttgggctgccgtcggtgagcaatgctgcggtacagccttcctcctgcgctgcttttagcgccagccaggcggccagctgatagcgcgcagtgacgtcctggccgtcactttcaacaattttcgcacggttttgcatgacatccgctccctgcgcgccaaggatttccgccggtagcctggggatgggcaatccggcagccagctccgggcagtgggtgaccagccgcccctcgctctgccagcgagacagcgcgttagccagccgggctttatggctaccgttatagcgaacctgaaagcccatcaggcaggcgctaaccaaaattttgtccttcatcatgcatccatagcgatttgtctgccctataccatagcgccagtcagactaaattacccgcgttcagaagcagacaaaataaggattgtgttctgccgttgagatcgctaacctgaggctccttgtgttgcctgatattcgctctgacataaggatcctgctatgaactccctcctgcgtattgccctggttggtgattacaaccctgatgtagttgcccataaagcgattcccctggcgattgatgatgccgccgccgtactggagctgccgctgcgttatgactggctggctaccagcgaaataaagtccgctgacgatctcgctgattacgatgctatctgggtggttcccgccagcccctataaaaacgccgaaggcgcgtttatcgctatacgccacgcgcgggaaaacagcattccattccttggcacctgcggaggattccagcacgcgattatcgaatacgcgcgcaacgttatgggctggcgggatgccgcacatgcggaaaccgataccgaaggccggatggttatcgcgccgcttagctgctcgctggtagaaaagtcggacaacattgaactgcgggccaatacgctgatctctcgcgcctatggccgcgacagtattgaagagggttaccactgcagctacgggattgccgccgattttgcccgcgagctggagcagggcgacctgcgggttacgggctgggatgatgacggtgagattcgggcggtagaaatggtgacgcatccgttctttgtcgccacgctatttcagcacgagcgcaatgcgctggaaggcaggcctgcgccgctggttcacgcgtttttacgcgcggcaagtcagtgagcgaacgcccggcggcggttgccgggcgttgatatcgctagccgttgatctcccgatcgcgaccggccagcgcgccaaatatcgccatcgcaacggaaatcagcgccacggcgatcagcgggatatgccagtcgccgttggcatcatgaatttttcccatcaccggcggtccgcaggcggccagcagatagcccaccgcctgcgccattcccgacagcgcggcggcctggtgcgccgagctggcgcgcagcccgataaaggtcaatcccagaatcatggtcgcgccggaaccgaagccaaagataagcgtccacagcaccgcctgagcgggtaaaaaccataaaccgagcgcgctgactgcgcacatcagggcgaccagcaccgcaatgccgcgctgatctttcagccgatgcagtattaacgggatcgccagccccggcgccgcggtggccaactggagcagcccgtgcagggagcccgcctgcgcttcgctgtagcctatgctttgcaaaatggcgggcagccagccgatgatgacgtagtagaccagcgagttaatcccgagaaacagcgtcacctgccaggccagcgccgagcgccagatcccgcggttgtggatggcgcccgaccccgtcagcggcgcggtgacttgcctgcgcgcctgcggtagccagataaacagcgccagcagcggaaatgccatcagcatcaacagcgcgccgcgccagcccagtccggcgagcgccagcggaacgaccattgccgaacccagcgccgccgcgccccccatggtgagagagtaagcgccggtcattttggcgacgtgctgcgagaagtcacgtttgatcagtccgggcagcagaacgttgcccagggcgatgccgcagccgataatcgcggttccgataaacagcagcgagacgaagggcagggagcgcagacccacgccgaggcaaatcaggatcatcgccagcagcaggctacgttcaatgccgaatcggcgggcgacacctgccgccagcggcgagaccaggccaaaggccagcagcggcagggtggttaacagaccggtttgcgcggtggtaaggccatattcgctgcgaatggcatcaagcagcggcgcggcgccggtaaaggtgacccgcaaggtggtggcgataagcagaataccggcaatcaatagcagattacggcggccggcagaaggtgaaacagaattcatggctatctcaaacaagaatacgtggcgcttaccatagcctgtttgccgcctgtttaaatcaagctaaaatgacagattatcgctaaaatcggacaatatcatgatcggactcggcctggacggctacgacccggacagcggccacgaagcggcggcggcttttcgtattcaggtggtcgcggacgagcagtacattccgcgccatcagcaccgtaaaggtcagctcatcctggcgctgcacggtgcgctgacctgcgaagtggagaacgcgatgtggatggtgcctccgcagtacgcggtgtgggtaccgggacaggtgccgcacagcaatcgcgcgacgccggaggcgcaggtctgctttttatttattgaaccccacgcggcgccgatgccggatttctgctgcacgctaaagatttcgccgctggtgcgcgagcttatcctcgttatggccgagcgcggcagggccgaactcgctaaaccggcaatgaaccgcctggtgcaggtgctgttcgatgaactcccgcagcagccgcaggagcacctgcagctcccggtctccgggcatccaaaaattcgtcagatggtggacatgatggccgtcgacccggcccgctggcaaacgctggcgcagtgggcggcggagtttgccatgagcgaacgcaatctggcgcggctggtggtgcgtgagacgggcttaagctttcgccgctggcgacatcagctgcagctgatcctctccctgcagatgctgatccgcgggcagacggtacagcagacggcgcagagcctgggctatgactcgaccaccgcctttattaccatgtttaaaaagggcctcgggcaaaccccggggcgctatcttgccagcctggctacgacttcccaataaacagcgaaatgatcccggcggcgatcagcgggccgaccgggacgccgcggaagagggcgacgccgagcacggtgccgaccagcagtccggctaccagctgcggctgcgagcccatcagcgccacgccgcgcccgccgagccaggaaacaaaaacccccacggcaatcgccagcaacgatttccagttcacgaaggagtgcagcagcgtagagggcggtagcgtgccgctggcaatgggcgccatcacgccgatggtgagaataataataccgatggtcagcccttgcttttcaatccacggaaagaaggcgttgagcggggtgacgcggacgataattaataccaggattgaaatagctacggtggtgttatggctaataaagccgagcgccgccaggcccagcagtattaacagggtggtgtcgagcatgtgcagaggtccttgccagaatataaaaaagaacagcccgtttactctacgcataatcgcgtaagtaaacaggttttttatcgcagactcgcgatttgaggcatctgcacgatcgattttcacccgcggcacaatccgcgccctggcgcaggagagggaacaatcaggcttcgcgatgaaacgcgatcagttccggacgggcaatacgcagatagtcggcggtatcaaggatgatggacttatcaagctgcccggcgttgaaggcgatttccgggaagcgctcaaacagcagcgggtcggcgaccaggcgtaaagaggggtggaagctgaaagggggaatggcgccaaagacgcaggcggtcagggcgtcaacttccgccggactggccagagaggctttgctgccgccgacgtattcggccagacgggctaaatccgcctgcagatcggcggcaaggatagccagaacgtgctgattaaccccatgtcctttaattttacataccagcgctttcgctccctgacccagcgcggtgccgcggatcttcgacacggcttcacactttccgacggcttcatgttccacgacccggtaacgggcgtggtcgcggttaagcagcgccaacagctgctgatgaatactcacttttactggcgcgttcatgtcgtttttttccttaaaaataaaacctcaagattaatcctctcgccccgggtaagcgtgttttttttgctttttattttcgtacagccgggcatccgcgattttcatgacgtcggccaggctgtcccccggcgccatgctgcaggccccccatgaaaaattaacgcgctggttaatgtcaatttccttcaggtgctggcgaatgcgctcgggtatatttttcgcctcctgttcctcataatcgatcagtatcaggaagaactcatcgccgcccagccggataccgtaatcgcttttacgtatggcggcggaaatggactgggcgagcagcacgatggcgcggtcgccttcatcgtgcccccaggtgtcattaaggtattttagccggtcgcagtccagcgccataaacacgatatttacaccttgctcggtgagcttttgcatacgcgattccagcagcgaggagagaatttttcggttgtacagaccggttaaggaatcactaatgttttctttaaaaacgtcggtatacaggcgaaagtgcatgcgtaccaggtgcagcagaacgccggtagatatcaggtaaaacaaaaatagcttccaggagctcagcagaaaataggacatatccagcgatagcgaaatgtgcaggttttctgcgacctgctggctatggtgggcgtagctgaaaaaatgcgtcttgctgcggtgaacgcggatttcagacgttgagtccgagtccgttaaggtgatgtcgagatagcgccagaccagggggcggtcggtggtatagagcagcttctcaatatcgtgacgagtgacgtctaccatcacaatacccttcagccgatcccgataatagaccggggttaagaacgacaaaatattctgtccggttagcgcgtcagcatagatgctggaaattagcgtacgcccgcgaagtaaaccgttaagactgaactgagtgatgcccagtttactgtcgtgaagaaagttccagttatcaacggggctgctatctatctcaatcggcgaatagaaatacgcgtatttattgtctaaatcgaggtaatagcggaagcgtttatctgatttgaacgttgccgaattcagtgcggcgataatatcgctttgggctatcgcggcatcaaaagcctgcagcgccgggagatcgttaatccacggctcgcacgaaggctgggtggtgctgagcgtaccgtgaagcccggggaaggtatgcccggcgatattgagcccgtatacgttgccattggtctgcacgccagcgcaggcctgtcgggccttttcggccgcgggatgcgtatccagctttcgcgagacctgggagataaccagctgattttgatatttatcgtacagaaaggcggattcgcccttctcgacgatgtagcgcatgtattccgacatatcccgatggctggcgactaattcatacaccagaaatgaagatgtcaggacaaccacccccgcagaaatgaaatgacggagtaatttattctgtaatttcatgatgataatttcgccagcacaattaagacaattctaccatgtgcggcgcagggacgccacgttcggtggcagacagactgtttatctatccagtgccggactcggtcagtatcgcgcggcaatggaaataaatagtttattaaatatgagggcgctaatgaatgttgctgtcgtaaatatcctgcaaaatccatttttcactcattttatcctcaatgaaatatgctgcaatgacgctgctatggctatcctggtgcagctaaaaatgaaataatgttaattatcaagcgaacttttcttatttttaccagtccttagcagggttacaggcagtactattgaaagcggcaatgaggttatgatgatggaaaacgcagcggtgcagggatcccctcgaaagtttaaaaaaataagggcgctaaacaggcgtcgaaattatttttttaagaaaatacgcaatgatctgcgagtctatatcgctaaagcgttctgggatagtcgcgcgcgccgcgaagctgatttaacctccgcgaaaacggtgctgttaatgcgtaatgaaggtgcgatcggcgatgtagttgttgattcagcgctggttaaatgccttcacgaggcgggaatgaccgttgactttctgttgaccaaatccaatagtcaggtcatgcggtataatcctcgcattcgccatatctatgaagccgagaatgtcgactcggcggattatttgcacaaatttacccataacgttcctcagtcagttattactgagcttgcgaataataagtacgatattgtaatcgacccgtcgttgtttgatattccggtacacaggatgctgctgttacgacagataaagcccagagcggtactgggtttcaataagtggccttctattaaacactacagcaagtcttttgattttgactgtgaaaactggcacgtcagtaagaccttttctttcatcgctgattatctccagctggataaaaaatctctgcaatcttatgatctgcatattccgcaggatatcagccagcaggttcgtgattatctggcggcgctcaacgggcgtaacgtggtgattaatatttttgccgggcatcaggaccgcagtatgtcgcaggcgcagctggcaacgcttatcgccaggctgtgcgaggattatccggacgtcaatatcatattgctcgatcatcgcaatgaaatccggattcccctgccggagaaggtctgcgtgaatccgttcaaaacgctgcaccactgcatggcgcttatcgccgaggccgacttagttatctcgccggatacctcggtggtccatatggcggcggcgtggaaaaaaccgcttatcgcggtctacaaagatgtgcggatgaataatcgactctgggcgccggggtacgacaacgcgcggcagattatcgttaaatgcggcaaggtataccagctggagagcttgcccgacctgataatggcggagattgatcccgtcactctgcaacaggcgcgagccgggtaaggcggggtaaaaaaacagccagcgtctgtgctggctgtccggaaaggcttaaccgtccgcttttgaggtctgcttatgaaacagttcacggaaaaccggataaatatcttccgggtcgcgaatatgctgcatagcaaagttttcgaaggttgactgcaggtgttcatattcccgccacagcgtctggtgcgcgcgccgggttatctcgatatagctatagtagcgcaccacgggcaggattttcttcgccagcagttcgtgacacagcggtgaatcgtccgcccagttatcgccatccgaagcctgcgcggcgtagatattccactgcgccgggtcatagcgctctttgaccacttcatccatcagcttcagggcgctggagacaatggtgccgccggtttcctgcgaatagaagaattcgtgctcgtcgacctctttcgcctgcgtatggtggcggatataaaccacatcaacgtttttataggtccggctgaggaacagatacagcaggatgtaaaagcgttttgccatgtcctttgtcgcctggtccatggagccggaaacgtccatcaggcagaacatcacggcctgacttgacggttctggccgtttttcgtagttcttgtaacgcagatcgaaagtgtcaatgaacggcacgcggtcaattttcgcccgcagttcggctatctctttgcgcagccgctcctcttcaagcagctgcgccggttcgcttttgctaatggtgtccaggtcttcttccagcgcgtgcagttcccggcgtttaccggcggtcatcgccgtgcggcgcgccagcgagttttgcagcgagcgaacgacgctgatgttagcgggcacaccgttagcggtatatcccgcgcgatgggttttatattccgtcagctgacgctgctggtttttcttcaggttcggcagggcgagatcttcaaagagcagatcgagatattcgtctttcgaaatctgaaaaacaaactcatcctgaccttctccgtcggcgctggcctggccctgaccgctgcctccaccgcctccgccgccctgagggcgctcaatgcggtcattctgtacgaagtgatcgttacccgggtgtacgcgattgcgcaggccgccgcgcccctgatgaaacatcggttcgttaatatcgtccgttgggatggagacggactctccgctctgaatatcggttaccgagcgcttgtttatggcctcggagatcgactgttttatctgcgctttatagcggcgcagaaagcgctgccggttgacggcgcttttatttttcccgttcaggcgtcggtctatgaaccaggtcatatgccctcctgtactgcatttgccaacttatgccccggccattcaggcgctgaaatatgcctggcgctgaatgtcattgggtcttcgcagttattattagcccggcagccgctgcctgccgggctggtctatcaggatgatttacgtacccgcagataccattcgcacagcaggcgaacctgcttgcgggtatagcctttttccatcatgcggtcgacaaagtcatcgtgttttttctgctcatcggttgacgttttggtgttgaaggaaatcaccggcaacagctcttcggtattggagaacattttcttctcgataaccgtgcgcagtttctcgtagctggtccagtttggattacgcccgctgttgtgcgctctggcgcgcagcacgaagttgactatttcgttacggaagtctttcgggttgctgatcccggcgggcttctcgattttctccagttccgcattcagcgactcgcggtcaaacagctggccggtatccgggtcgcgatactcctgatcctgaatccagaagtcagcgtaggtgacataacggtcaaaaatgttctgcccgtactccgagtaggactcaaggtaggcggtctggatctctttcccgataaactcggcgtatttcgggatcagatagcctttgaggaactcaaggtaacgctcggactgctcctgcgggaactgctcgcgctcgatctgctgctcgaggacgtagaacagatgcaccgggttggcggcgacttcggcatggtcaaagttaaatacccgcgacaggattttgaacgcgaagcgggtagacaggccgttcatcccttcatcaacgccggcataatcgcgatactcctgataggatttcgctttcgggtcggtgtctttcaggctttcgccgtcatagacgcgcatttttgaataaatgctcgagttttccggctctttcaggcgcgacagaatggagaagcgcgacagcgtttccagcgtgctcggcgcacacggcgcatgggtcagctcgctgttgttaagcagtttttcatagatacggatctcttccgagatacgcaggcaataaggcaccttgacgatatacacgcggtcgaggaaggcctcattgtttttgttattacggaaggtcacccattccgattcgttggagtgggcgaggataatcccgttgaacggcagggcggagatcccttcggtaccgttatagttaccttcctgcgtcgcggtcagcagcggatgcagcaccttgataggcgctttaaacatctcgacgaactccatcagcccctggttggcgcggcacagagcgccggagtagccgtaggcgtccgggtcattctgcgcgtagtgttccagtttacggatatcgactttaccgaccagcgccgagatgtcctggttgttttcgtcaccgggctcggttttggcgatggcaatctgcgccaggattgacggccacactttcaccacgcggaatttcgtgatgtcgccgccgaattcatgcagacgcttggccgcccacggcgacataatcgtccccagatagcggtttggaatgccgtactctttttcgaggatttgcgcatcctcctgcgggttaaacagacacagcggatggtcgttgaccgggctgcgctcaccgtttgcgctgagcacatagatagggacgcgctgcatcaaggacttcaggcgttcggcaagcgatgatttaccgccgcccacggggcccagcagatacagaatctgtttcttctcttccagcccctgagcggcgtgttttaagtaagaaacaatttgctcgatggcatcttccataccgtaaaactcttcaaaggccgggtagcgcgcgacgacccggtttgaaaagagacgggatagcctgggttcgagggccgtatcgaccatgaccggctcaccgatggccatcagcaatctttctgctgcgttagcataagcactgcgatcttgccgacagatggtaagaaactcctgcagtgtgaactcttcgtccttggcagcttcatagcgctggcgatagtgatcgaatatattcatggcatgccgtcctttcgtttttagcacaggttgagagccgttcatatgaatagtgggagctcccggaagaggtaagctgcacagcgctctctgaatctccagcaacccttatgccaggttggcgaagtctcgggataacgtgccccgcatttacttcttctaaattaaagcgtagatgcatttggaaaacttgcatggcgcagaaaatcaatttcaatgacttatcaacaactcatccggaaaagcagcgtctcattcccacttcgggtttcgccgcgtcatgacgctgtcattcagctgtcagcgggtggtcatctgatgatgagaatctggtgaattcagtgtaatgactggtaaagaatttgaggcatgacgtatacaacgttaaactgcctgcgctaataatttgacaacaggaatatggatcgtgactaaaatcaaacttctggcacttggtgtgttgattgcgacttcagcatccgccgtacacgctgaagggaagttcactttaggggcgggtgtaggcgtcgttgaacatccgtacaagcaatatgatgctgatgtttacccggtgccggtgattaattacgagagcgataacttctggttccgcggcctgggcggtggtctctacctgtggaatgataccaacgataagctctccgtgaccgcctactggtcgccgatgtactttaagccaggcgacagcgatagcgagcagatgcgccgtctggataaacgtaagtccacggtgatggcagggctttcctacgaacactatacgcagtacggtttcctgcgcaccgcgctgtcgggggacaccctcgataacagcaacggtatcgtgtgggatctggcctggctgtatcgctataccaacggcaacctgacgcttacgccgggtattggcgtggagtggaacagcgacaaccagaacgagtactactacggtgtttcgaagcatgagtcgaatcgcagcggcatgcgcagctacgatccggacagcagctggaacccgtaccttgagctgtcggctaactatcgtttcctcggcgactggagcgtatacggcgtggcgcgctatacccgcctgtctgacgaaattaccgatagcccgatggtggacaaatcctggagcgggctgatttcaaccgggatcacttactccttctgatagtgcgttattacagtgcaatttgtgcatcaaaacagggcgtaaagccctgttttgcattacggtggtgcaatcaaacacaggagcatgtcatggcagaaaggacaatccgttttggcgagcattcagcggttccgctcatagggcaggggacctggttcatgggcgaaaacccggctctgcgcgcgcaggagtctgctgcactacgcgcgggcatcgatcttggcctgacggtgatcgatacggcggaaatgtacgccgacggcggcgccgaagaggttgtcggcgaggccattcgcgggcagcgcgagcgcgtggtgctggtgtctaaagtctatccgtggaacgctggcggtcgcaaaatagccagcgcctgcgaggagagcctgcgccgcctcaataccgactatctggatctctatctgctgcactggcgcggggactattcattgcaggagacggttgcgggcatggacgcgctcgttgcgcaggggaaaattcgtcgctggggcgtatcaaacctcgattacgatgatatgcaggaactctggcaggcgaacggcggcgaacagtgcgcgaccaatcaggtgctctaccatctggcctcccgcggtattgaatatgacctcctgccgtggtgccagcagcagcggctgccggtgatggcatattgtccgctggctcaggccggtcgactgcgcaatggacttttaaatcataccgttgtgaaaaatattgcgcaggagcggggcgtaaccgcggcgcagattctgctggcgtgggtgattagccaccggggcgtaatagcgatcccgaaagcgtcaagcattgagcatgtcaggcaaaatgccgcggtgctggatattgtgctgaacgatgaggagcttgcgcttctggataacgcctacccggcgccggccagaaaaacgccactggatatggtctgaacaagcgtttaagaaaagccccgacttcgcggggcttcagccgtcatccggcagatatggcgcacacgcggttaacccgtgggccaagcttcctggcgttagcgtttcaccacgcggagggtttgcgtcaggcgcgaaggtttctcttcgctggccttctgcgtttcggtcacgcagcaggtttctacacaaacgaaggtcttgtaaccatcatccggcatgtcgcccatgctgacggaaagcgccgggcccgggttccaggccacaacgttgctgttatgatgatgcgtaacgtcgatgttgcggttcagcgcatcgtcatgaatcacgctgcaggtttcggcattcagatagacgcggtcggtacggtcgggaaaagtctctgtgccgttgcttaatacgccttcttccgcatttttcactttatcaatataacggtcgcccagaccgctgaccttcactgccgcaatgtcgccgacgttgaaataggtatgcagggcagacgtggtttcaaattcgccgtgcgcctccagctcaatttcgcaggttttgcccagcttaaagcgcgccagcagggtgaactcgtgcggccagtactggcgggtggcgtcgctgcttttcagtgcaaaggtcagcaccacgccgttgtcgtcttcatcgtgccctttcagggcccacggcaggttgcgggcgaagccgtgggagggcagaccctgcagagcagaaggaccaaaccacggccagcaaatcggcacgccgccgcgcagggcaacgccgtttttaaatggggtgttgccgctgagccacaggacttcttcttcgccagcgggcttccaggagagcaggtgagcgccctggaaagccacggacgctttcacctgcggatggtcaacgacgatcagctccaggtcatcaagctggcggcgggaaagtacaggggtaagctgttcgataaccgggagggcaaaaattttattaatcattacgcaatcctttatcttcagacaaaaaaaagagcgaccgaagtcgctcttacagattactgtctcatcccaacttatttggagatgtgagcaatcaggtccagaaccttgttggagtaaccagtttcgttatcgtaccaggaaaccagtttcacaaagttgtcgttcagagcgatacccgctttggcgtcgaatacggaagtgcagatttcaccgttgaaatcggtggataccacgtcgtcttcggtgtagcccagaacgcctttcattgcgccttcggaagcagctttgattgctttcttaatttcttcataagaagcagctttttccagacgaacggtcaggtcaacaacggatacgttcggagtcggaacgcggaacgccataccggtcagtttgccattcagttctggcagaactttacctacagctttagcagcgccggtagaggacgggatgatgttctgagctgcgccgcggccgccgcgccagtctttgtgagacgggccatcaacggttttctgagtcgcggtggttgcgtgaacggtagtcatcagaccttcgatgatgccgaagttgtcgttgataacttttgccagcggagccaggcagttggtggtgcaggatgcgttggaaacgatgtcctggccttcgtatttgtcaaagttagcgcctttaacaaacatcggagtgttgtctttggacgggccagtcagtacgacttttttcgcgccagcggtgatgtgtttacgagcggtttcgtcggtcaggaagataccggttgcttcagcaacaacgtcaacacccacttcgtcccacttcaggttagccgggtcacgctcagcggtaacacggatttttttaccgttaacgatcagatgaccgtctttcacttcaacggtaccgttgaaacggccgtgagtggagtcatacttcagcatgtaagccatgtagtcagcgtctaacaggtcgttgattgcaacgatctcgatgtcagaacgttcctgagcagcacggaaaacaatgcgaccgatacggccaaaaccgttgatacctactttgatagtcatatattccaccagctatttgttagtgaataaaaggttgcctgtaaaattacaaaaaccttacgcagcgtcaagcggaatcgtgtcaatcattgcgacaaatcaatccagagcatgcctttgcgcggtcgatttatcccactttccctttgagcccaattccatatgggggctgcgcccggaattttaaaggtcactgaagataaaaatgtgatattcatcacaattgtgtggctgccttttggcgtcgcctaagtttagaacaaaagtgcacgcttcattgttaatattttgttagaattgacgtgaaaagttgtcctttcacagcgagaagcaagccaatgtcgaataaaccctcttcggacgagctcaaaaaaaatttgagcgagatgcagttttacgtgacgcagaatcacggtactgaaccgccgttcaccgggcggttgctccacaacaaacgcgatggcgtctaccactgcctggtgtgcgatgccgcgctgtttcactcgcaaaccaagtatgattccggctgcggctggccaagcttttatgagcccgtcagcgatgacgctatccgctaccttaatgattactcccacggtatgcagcgcacggaaattcgctgcggaaactgcgatgctcaccttgggcacgtattcccggatggtccacagcctaccggagagcgtttttgtgttaattcggcctcattaagcttcaccaatgatgaaaacggtgagcaaattaagggttgaaaaaacgattcagcaaattattccaaacggggttggcggaagatggaaattgagcggattattgacggtatgacgccggaagtttatcagcgcctggcgacggcggttgagctgggtaaatggccggacggcgtggcgttgactgacgaacagaaagagaactgtctgcagctggtgatgctctggcaggcgcgatacaacgttgacgcgcagcatatgaccatcgataccaacgggcagatggtgatgaagagtaaacagcagctgaaagttgacttcggcattacgccgcagcctatcgcgacctttaaatcctgaggctgaaaaggcctgcgtcagcccggctaactgcgcgccgggctttgaggtatcacagcgttacttcttgttcatcatcgctttaagatcggcgaaggggttatatttcgcttcgccgacgcttttctgcgcatcttcgccagcgaccaccgtcgagccatacagatcggcttcagtgtattttgagtgctcatgatcgtgacagtacaggcacagcatctcccagttgctaccatcttccgggttattggagtggtcgtggtcaatatggtgtaccgtcagttcacgcaggtttgaatagacaaactctcgcgagcagcgtccgcagacccaggggaagagcttcagcgctttttcgcggtaaccgacttccagacgggcgtagtttttcgggatataagccataatacccatgccttttgttgcaaatgaaaagctgcgccggagccggcgcagcggaatggggttatcataacctattgtgctggcgctgacaccgcgcagatcagcgtttgatccccaatgactcggccagctgtttcgctaactgattctggtcatcggcgccgtactcccagaacatcgcgccacccagccccttgctcttgatgtagtcagccttgatggccaccgagcgcgggttctcatacgaaagcgcaaagagggcttgaccgtcggcggactgcaccgacagccacggtaccttcgcttcatcatcccaatgctgagtaaagcgcttctgcggatcgttgattaacttcgccacgatatcgttatatttcacataggtatctttggtcagatcgacgcccagcgattcgaacagttcaatctgttgagccgcaaagtaggggcgggtggccgggtttttctgcgcgtccggcttgctccagtcaatacccggctcgacggcgcgtttgggtatccggccatagaaaccaatccccaggttcatctggctcgcctttagaccggcggcaaggtagttgttcactataaagtccgcgctgtacttatccgcttctgcgaccgtcggccagcgggttgaatcatacaggttggaattgaagtactgggtaccgtaggccaggtcgtaggtcatcaggttgatgtagtcgagcgatggcgcaatggctttgacgtccacccagctttttgggctctccgcgttggcgcctacggcgatggtcaccagttttttattaccgaccgccgcgcgcagctctttcagcagggcggtaaaattatcgcgatcggccggttggctggcgaccagcccccacgcgccgttgaccggatactcccagtccagatcgatcccatcgagaccgtatttttcaataatcgcctgagcggactgaataaacaccgcccgggtttccttcgtcgccgccgcgccggagaatccgcgcgctccccagccgcctacggaaagcaagactttcaggttcgggttctgctggcgcaagcgggggattttctgtaaatcagcctgcactttcggcgacagccaaatttgatgcagcttgctcggatctttcagggcggcgttggtttcgtctttttcatcgttgtaaaccagaccaaacgagtagttgagatgggtaatctggcgtacgtccagtttatcaatatcgccgcctggaccggcagtgacgtcgccgccgccgttaaagtagccgacggacatcagtgagttagcggaaacaacgctcgcgcagagcaggggtaaagctgccagtaaaggcaaaagtttcatagcggatcctctttgacttaaaagtgacattgaaaagcaaacacgccacggaaatggcgtggcgaaaaaaacagctcgtgcagcctagcatcttccgctgcgcaaaaatgcgaagcggttcacggctgcattagcgaagcggtagtgagacgacgtccttttcttcacttcaatcatctccctcggcgaattttaccgtatttgtgatctgagttgtgaaatgcagatcaatatctgtgttttaaagatttaatattgacctcaaagattctgtggttaagtatggctttcactgatgcaaaatcattaaacaaaggaaaacgcaatgaaagcactggcaagatttggtaaggcctttggcggctataagatgattgatgttccggagccggcgtgcggaccggatgacgtggtgattgaaatcaaagccgccgccatctgcggcgcggatatgaaacactacaacgtggacagcggctccgatgaatttaactccattcgcggtcacgaatttgccggtgcaattgtccgggttggcgaaaaggtcaaggactggaaggtcggccagcgggtggtttctgacaacagcgggcacgtctgcggcgtgtgtccggcctgcgaacagggcgattttctgtgttgtacagaaaaagtgaatttaggcctggacaacaatacctggggcggcggattttcgaaatactgcctggtgccgggggagatcctcaaaattcatcgccacgcgctgtgggaaatcccgccgggcgttgattacgaagaagctgcggtgctggatcctatctgtaatgcctataaatcgctcgcccaacaatccaggtttcttcccggtcaggacgtggtggttttcggtaccggtccattagggctatttgccgtacagatggcgcgcattatgggggccgttaatatcgtgatggtcggtctggaagaggacgtcgcggtgcgtttccctgttgccaaagcgctcggggcaacggcggtcgtcaacggttcatccgaagatgtggtcgctcgctgccaggcaatctgcggcaaagataatctggggctggttatcgaatgttccggcgccaatatcgctctcaaacaatccattgaaatgctgcgccccaacggtgaagtggtgcgcgtaggtatggacttcaaagcgctggacttctccatcaacgatatcaccgcgtggaacaaaagcatcatcgggcatatggcctatgactctacgtcctggcgcaacgccattcgcctgctcgccagcggcgctatcaaagtcaaaccaatgatcacgcatcgcattggcctgtcgcaatggcgcgaagggtttgacgccatggtcgataaaaccgccatcaaagtcatcatgacttacgactttgatgaataaccccgtgataaaaggaacgttatccgatggaacagatagcaaaaccgcactgcggcgccaggctggatcgcctgcctgactgccgctggcactcttcgatgtttgccatggtcgctttcggattactggtctgctggagtaatgccgttggtggattaattctcgcgcagttaaaagagctcggctggaccgacaattcgactaccgccacgttctccgccattaccacggcaggtatgtttcttggcgcgctcggcggcggcatcattggcgataaaattgggcgtaaaaacgcgtttattttgtatgaagcgattcatattatcgccatggtcatcggggcgttttccccgaatatgagcttccttattgcctgtcgttttgtcatgggcgtgggattaggcgcgctgctggtgaccttatttgccggtttcaccgaatatatgcccggcagaaatcgcggaacatggtccagtcgggtctcgtttatcggtaactggtcttatccgctctgttcgctgatcgcgatggtattaacgccgctaattagcgcggaatggaactggcgcgtgcagctgttgatcccggccgcgttgtcgctgattgctaccgtgattgcctggcgcagtttccctgagtccccccgctggctggagtctcgcgggcgctatgcggaagctgaggagataatgcgggccattgaagggcgggtggctcggcagacgggcaagtcgctgccgccggtagttatcgatgatgacggcaaaccgccgcgcgccgttccttattcggccttattaacgggggcattgctgaaacgggttattttaggctccttcgtgctgatagccatgaacgtcgtccagtacaccttaattaactggctaccgacgatatttatgacccagggtattaatctgaaagactctattgtcttaaataccatgagtatgttcggcgcgccgttcgggatttttatcgccatgctggtgatggataaaattcccagaaagacgatgggtgtaggtctgttagtgttaattgccgcgctgggatatatctattcgctgcaaaccagcatgctgctgattacgttaattggcttcttcctgattacgtttgtctatatgtacgtctgttacgcctcggcggtttatgttccggaaatatggccgactgaagcgaagcttcgcgggtcgggtctcgcgaacgcggtggggcgaatcagcggtatcgccgcgccttatgcggtggcggtactgcttaacggctatggcgtaaccggggtgtttgtgctgctgggggccgtctccattattgtcgctatcgctattgcaaccatcggaattgaaactaaaggcgtctctgtcgaaagtctcggtattgatgcagttaccagcaaataatattgacgggcaataaaatgaaaaattcaaaagcgatattaaaaacaccgggcacgatgaaaattatcgctgccgatatcccggtacccaaagaacatgaagtgctgatcaaaattgaatacgtcggaatttgtggttcagatgtccacggttttgagtcggggccctttattccgccgaaagaccctaatcaggaaattggtctgggacacgaatgtgccggtacggtggtggccgtaggcaaaagcgtgagcaaatttaagccgggcgaccgggtgaatattgaacccggcgtgccgtgcggccactgtcgctactgcctggagggaaaatacaatatctgtcccgacgtcgactttatggccacgcagccaaattatcgcggtgcgctaacccactatctatgccatccggagagcttcacttacaaactgcccgataacatggacacccttgaaggcgctttggtggagcctgcggcggttggcatgcatgccgcaatgctggcgaacgtcaagccgggcaagaaaatcgtcatacttggcgcaggctgtattggcttaatgaccctgcaggcatgcctttgcctgggggcaaccgacatcgcggtggttgatgtgctggaaaaacgccttgccatggccgaacagctcggagccaaagtcgttatcaacggcgcgaaagaggacaccgttgggcgctgccagcagttctccggcgatatgggggccgatgttgtttttgaaacggccgggtcggccatcaccgttaagcaggctccttacctggtgatgcgcggaggaaaaatcatgatcgtcggtacggttcccggtgattcagccatcaatttcctcaaaattaaccgtgaggtctcgattcagaccgtcttccgctatgccaaccgctatccggtcaccatagaagcgatctcctccgggcgtttcgatgtgaaatcgatggtgacgcatatttatgattttgaggatgttcagcgcgcgtttgatgaatccgttaataacaaacgcgagattattaaaggcgttattaaagttaaccattaatgtattgcaaagggagaaacaaccatgctggcagatattaaatattgggaaagcgatgctcagaataaacattatgcgattgcccactttaacgtgtggaatgcggaaatgctgatgggagttattgatgcagcggaagaggctaagtcgccggtgattatctctttcggtaccggatttgtgggcaatacctcgtttgaagatttttcgcatatgatggtttcgatggccaaaaaggcgtcggttccggtgattgctcactgggaccacgggcgcagcatggagataatccacaacgcctgggtccacggcatgaattcgctgatgcgcgacgcttcagcctttgattttgaagagaacattcgcctgaccaaagaggcggtggatttcttccatccgctgggtattccggttgaggcggagctggggcatgtggggaatgaaacggtctacgaagaagcgctggcggactatcactataccgacccggatcaggcggcggagttcgtcgagcgtaccggctgcgattcgctggcggtggcgattggcaaccagcacggcgtctatacctcagaaccgaaattgaattttgatgtagtgaaacgtgtgcgcgaggcggtatccgttccgctggtgctacacggcgcgtccggcattagcgacgcggatattaagcaggccatatcgttaggtatttcgaagattaacatccataccgaactgtgccaggcggcgatggcggcggtacaggagaaccacaatcagccgttcctgcacgtagaacgtgaagttcgcaaagcggtgaaagcgcgcgcgctggagaagatcaaactgtttggttctgacgggaaagcggaatgacaatatggataatatcgaggttatttgtctgggcgcggctatcgtagatattcctctgcagccggtgagtaaaaatatctttgatgtcgactcttatccgttagaacgtatcgccatgaccaccgggggagatgccattaatgaggccactattatttcccgactcggtcaccgaacagcattaattagccggatagggaacgacgctgcaggacattttattcttgaacactgcagccgggagaatattgatatccatagcctgaagcaggatagcgaaatcgatacctcaatcaacgtgggcttagtcaccgccgatggcgagcgtacttttgtgactaaccgcaacgggagcctgtggaagctgaatattaacgatgttgattttgaccgcttctctcaggcaacgctgctgtcgctggcgagcatttttaatagcccgctgctcgacggcaaagcgttaacggagatcttcattcaggccaaagcgcatgggttaattatttgcgccgatatgattaagccgcggcttaacgaaacccttgaggatattcgtgaggcgctgagctacgtcgattatctgtttcccaattttgccgaggcaaaactgctcaccggcgaagagacgctggatgagattgccgactgtttcctgagctgcggtgtaaaaacggtcgtcatcaagaccggcaagagaggctgctttattaagcgtgccgatatgaaaatggaggttccggcggtttctggcattaccgccatcgacaccattggcgcgggggacaattttgcctcgggatttatctccgcgctgctggaaggcaaaccgctgcgcgactgcgcgctgtttgctaacgcaacggccgcgatctcggtgcttagcgtaggcgccaccacgggcgtgaagaacagaaagctggttgaacaacttctcgacgaatacgaagggtaatagcagcagatgaaaatgattcctttaggcagtacggatatgacgctttcccgcatgggattaggcacatgggccattggcggtggcccggcatggaacggcgatctcgacctgcagatatgtatcgataccattgttgaggcgcatcgctgtgggatcaatctgattgataccgcgccgggctacaactttggcaacagcgaagtgattgtcggccaggcgcttgaacagctgccgcgccgtgaagtcgtcgtcgaaaccaaatgcggtatcgtctgggagcggacgggtagcctgtttaacaaggtcggcgatcgccagctgtacaaaaacctgacgcccgagtcgattcgcgaagaggtggaggccagcctgcaaaggctgggtatcgacaccattgatatctatatgacccactggcagtcggtggagccctgctttacgccaattgcggagaccgtcgccacgctgaacgcgctaaagaaagagggcaagattcgcgccatcggcgcggcgaacgtcgatgtcgggcatatcagggagtacctcaaacacggcgagctggatatcgtgcaggccaagtacagcattcttgaccgggcgctggaagccgagctgctgccgctctgtcagcagaacggtattgtggtgcaggtctactcgccgcttgaacaggggctactgaccggcactatcggccgtgattatgttcccggcggcgcgcgtgctaataaggtctggttccagcgggaaaatatgctgcgcgtgattgatatgcttgagcagtggcagccgctgtgcgaaaaataccgctgcaccatccccgcgctggcgctggcgtggattttaaagcaaagcgatttaatcaccttactcagcggcgccacggcgcccgaacaggtgcgtgaaaatattgccgcgctgaccatcgctttgacggatgatgattcattattgatgagacgaatggcggaagcggtggagacaaaataagagcggcatcattgacctctgtttctgtgtaaaagaatattggaatctgctattcggacatgttattttgaaaacaaacatatcctggcagaggccagggggttattactttgcgggaaacagaggtgttatcgtggcggcaaaagacaggattcaggccattaagcaaatggtgacgaacgataagaaagtggcggtttctaatttaagcgcaatttttcaggtcactgaggaaaccatacgccgcgatctggaaaagctcgaagatgaaggttttttgacccgaacgtacggcggtgcggtattaaataccagtgctttatccgacaatattcatttttataaacgggcaaagtctcattttgaagagaagcaaattattgcccgtaatgccttgccgtttattaaaaataaaaccaccatggctgccgattccagcagtacggcgatggagttattaaagctgctaaaggagagaaacgatctcacgctgttaaccaactcggcggaagcatttcatgagctggcgcagtcggaaataaatgttgtttcgaccggcggagaactgaataagaacacgctgtcgctgcaggggcggatcaccaaggaaattatcagtcgttatcatgtagatattatggtaatgagctgcaaaggcctcgatatgcagagcggggcgcttgactctaacgaagcggaagcggaaatcaagaaaaccatgattcgccaggcagccgaagtagctctgctggtcgatcactccaaattcgatcgtaaagcgttcgtccagctggtggattttagccatattaattaccttatcactaataaggcgcccggtgcacagtggattgctttctgtaaagaaaataatattcaactggtttattaacttcgccgttggtggtgtcgatattgttttcgtttgcacctgggtaatgccataaaaatttaatgatgacggacagcgcggcaaagtgaccctgccgccaacgccatactttataatttagctgaatttgaggcatccagatggaacaatgtgaccctatcggcgcaagattagaccgcttacccttgtcgcgatttcattttcgtatttttgacattattagttttagtttattaatcaccggtttcctaagctattccggtaacgtggtgctggcaaaattagtcagcaacggctggtcaaataattatctcaatgcggcatttacctcggcgctgatgtttggctactttatcggctcgctgaccggcggttttatgggggactatctcggacggcgcaaagcttttcgcgtcaatttactgatcgtcgggatctctgcctgtgcggcaacctttgtgcccaatatgtactggcttatcttattccgctgtctgatgggctgcgggatgggcgcgctgattatggtgggctatgcctcatttaccgaatttattccgcccgcggtgcgcggcaaatggtccgcccgactgtcgtttgtcggcaactggtcgcccatgctgtcggcggccatcggcgttgtagtgattgcttttttaagctggcggatgatgtttctgctcggcggtgcggctatgctgttggcctggtatctgtcggggatgtattttattgaatccccccgctggctggccggcaaggggcaacgacacgcggctgaagaacacctccggcaggtggagtcgcaaatcgagaaagagaaaaacatcacattgccgtcctggcagaatactgccccggtggcggagccgtgcgcggaaagcgactctttctggctgctgtttaaaggtcagatgctgcggcgaacgctggtggcgatcacggtactgatcgccatgaacatttcgctctataccatcacggtgtggatcccaacgattttcgtcaattcggggatcgacgtgacgaaatctatcttgatgaccgcgataatgatggttggggcgccggtggggatatttatcgccgcgctgattatcgaccgttttccgcggcgattatttggctcatttctactgataattattgcggtgctcggctacttctattcgattcaaaccgcagagtgggccatcttaagctatggtctggtgatgatatttttcctgtatatgtacgtctgctttgcttcagcggtatatgtgccggagctgtggccaacgcatctccgtctgcgcggttcaggttttgttaacgcggtaggcagaattgtcgccgtatttaccccttacggcgtcgctatcctgctgacccgctacggcgcgattaccgtatttatggttcttggtttattgctggcgctttgcgcgctgattctgttttgttttggcatcgaaacgcgcaacgcgtcgctggaagagatttccgctctggcctgagataacgcgccgacaggacaatgcctgtcggcgtattttatgcgtgggtttccagccagtcgtcaagggtatagagagttgcgcccgcggcggccatctccataaacgccagattgctatcctgcggctgaatattcaccccgcggcagccgtcggtaatcacgttgacggtgtagcccagattgagggcgtcaagcacggtaaacttgacgcagtagtcggtggcgagccccagcaccgttagctcgctgatgccgcgctcgcgcagccatgcatcgagctgcgttttctgccggtggccgttgtcgaaaaaggcgctgtagctgtcaatggccggattttcccctttgtggaacacggcggcaatatcctgctgtttgagcagcggatgcagcgccgcgccttcgctattctgcacacagtgatccggccagaacgtctgcgccaggccatcaagctcgccctgggtatagggttcgacctgatgctgactggcaaagctgccgtggttcgccgggtgccagtcctggctggcaactaccgtttcgccccgcgccaggctccaggcgataagctggttggcgacgtccaccgtgctgtcgccctgcgggacggctagcgcgccgccggcgcagaaatcattttgtaaatcgaccagtagcagcgcgcgctgggtcatgtgcttctccttactcatcgggtgtcagttcgccgcgcagattctcctgcatggcgtgacggatagccgccacgtccagatcctggctcagcaaatagtgtagcttggtcagcgtggcctcgacggtcatatcaaatccgctaatcacgccagcctgcgccagcgcgttgccggtggcgtagccgcccatgttgaccttgccggacatacactgggtcaaattaatcaccacgataccgcgctggctggcttcggccaggacctgaataaactcgccgttctgcggcgcgttaccgacgccataggagcgcaggatcagcgctttgaccggctggcgcaggaagttgcgcaccacgtcggcggaaatgccgggataaatcgtcaccacgccaatcggctgcggcgtgatagggtgaaccaccagctcgccgctgccgtgcggcgcgggaggcgtgccgagccggcgaatatggataccggcttccagcagcggcgccaggttgggcgaggcgaaggcgttaaaaccgtcggcatgggccttcgtcgtgcggttgccgcggtagaggcgattattgaagaacagcgacacttcgttaatcggatagttggcggcgacgtacagcgcgttgagcaggttaatctggccatcagagcgcagttcggcaagcgggatttgtgaccctgtcacaatgaccggttttcccagattctccagcatgaaggagagcgccgaggcggtaaacgccatggtgtccgtgccgtggaggatcacgaaaccatcgtactggtcataatggtcgcgaatatcgtcggcgatatgctgccagtcttccggcgtcatatcggaagagtccattaacggggcgtattcatgaatggtgaagtccggcatctccgggcggtgaaactcgggcatcaacgccagctggcgctgtaaatggccggaaacggggatatagccgtgttcagaacgctgcataccaatggtgccgccggtataggcaacgtaaatagatttcttctgcatagcatcgcttaggttaaacgtagacaggcgcagtatagaggggcggaagaaaaaataaagtaaatgccgccccacgggatggggcggcagaggattaacgaatattggcgcaggttaagcagaacgcgtagcggttctgcggatcgttgaatgccgccagcttatcgctctcggttttcaccgcattggccgccgcggcgaccggtgcgggcagatacgcctggaccgctgccggcagcgccgcgcgaacggaacccgtcaggctatccaccaccatcgaaaagaaggtcggttcttcctgatagtagttgatatgccactgtttcagcttcgccagttcggcggcttttgccaccgcgtcgtcaaagtcgccaaggctatcgaccaggccgttcgcttttgcatcttcaccggtccagacgtggccctgagcgatttggtcaattttctccggcgtgctcttacgcgcgttcgccaccagggtaataaaacgcttgtagccgttttcgatgctgagctgcatcagctgttgcacttccggaggcagcgctttggtggttgagacatcagccagcggcgaggtggccacgccgtcggtatggacgccaattgagccgagggtatcttcgacggtattgatcaccccaaagataccgatagagccggtaagggtgctggggttggcgacgatataatccgccggggtggagatccagtagccgccggaggctgccatgccgcccattgagaccaccactggtttaccggccgcttttgccgccgccagctcttcgcgaatcatctcggaggcgctgacgctgccgcccgggctgttaacccgcagcacgatcgctttcactttcggatcgaggcgcgcgtcgcggatctgcgcggcggtggtgtcgccgccgacgttacccggcgtttcttcgccatccataatcgcgccgttagcaaagataaccgctattgcggaaccctggtcggcaggcgttttcagcgtgtaatcgtagtagctgatcgcgctgtagttgttgtcctctttactccagccaaactgtttagtcagcgctttttccacctcggtagaggtgcccagcgcatcaaccagcttgttatccagcgcgtattttgccgtgtcgccatcgactttacgcaggccgtcaatcacgccctgagcgccggggaacagctgctgagcggtgatctggcggttggcggcaatggtattgaggtagttttgccacagctcgccaatccagcggctgtccgcctcgcgcgccgccggggacatatcatcgcggataaacggctctaccgctgacttgtaggtgccgacgcggaaaacgtgggtcgacactttgagcttgtcgagcagcgatttgtagtacaggccgttggtcgcgaagccgtgcaggtccacttcgccctgcggcgagagccagatcttattggcgaagctggccagatagtactgaccctggctgtagctgctgccgatggcatataccggcttgccgctatcgcggaattcgcgcagcgctttaccgatatactgcatcgacggctgatcgccgccggcaaagtccttcagatccagcacgataccggtgatattgcggtcgtctttcgcctggcgaattgtctgcacaatgtcgaacagcgagttttcctgcaggcgatcggaactggcgccaaacagctggcggccaatcacgccaagcttgctgctggccgagggtttatcgaccaccacgccggtgatatccagcagcagcgcgccgcgggtagcgtgctctgtcgttgtactactgaactgggcccagatgccgacgcaggccagcaccagcaccaggaaaaccacgttcagtgcgagctggcgaatgaaatttagcacgcgccatgtccatttaaaaaatccggcgagcagtcgccaaagagttcgcatgtattctccctaaccataatcaaaaatgggcgagccgcaggggctgccgcgtctggctatcctaatgagagtgccgtcggttgtcagcaggaatcacccgttgggctgtaacaaaatccttgcgcatgttaattttatgaaaaatcacatcacaggagttatacagatggatgctctcgaactactggttaatcgccgcagcgcttcacgtctgaccgacccggctccggcgggcgaacagctggaaaacatccttcgcgctggcctgcgcgcgccggaccacgggacgctgcagccgtggcgcttcttcattattgtcgatgaagggcgcgagcgcttcagccagctgctggaaaaaggcgcggtggcggcagggggagatgaaaaagcgattgaaaaagcgcgcagcgcgccgtttcgcgcgccgctgatcattgcggtggtggcgcgctgtgaagatcatccgaaggtgccaaagtgggagcaagagatgtcggcgggctgtgcggtgatggccatgcagatggcggccgtggcgcaggggtttaacggcatctggcgcagcggcgcgttaaccgaaagcccggttgtacgcgaagggtttgcctgccgcgagcaggataagatcgtgggctttctctatctggggaccccgcagctcaaagcgtcaaccaccatcgctttgccggataccgcaccgttcgtgacgcgcttctgagtccgttctcgttatgccgggcgggcccggctcaccggctcctccgggggagtagcccggctaagcgcagtgcgagctgggtggaagcagtgccagtctatcagacttgacacttttcccggaggcggtgctggcgcacctgtccgggctatcaaaccgcggacggctgggaacccgtagcccggaaaaagcgcgtcaagcgccgcctccgggaatttaacagcgatgaggttacttctgccgtttcgcgaattcgtctttcgctttctgaagctgctgctggaaggccggattggtatgcagcgtggcgacgaccgccgaaccgacgatacgcgctgcgtctacgtcgctctgccagtgatagccgcagatcacccggctctcgccgagctcaaagccgcgcttaaggatttcattttgccgctggggattaatctcagccagcaccagcgcggtggcccagccgatagaggtgtggccggaggggtaggagccgtttttcgacagcgtatcctgttccttggtgttacaggtggcgacgccataaaacgcaaatgggcgaatgcgcatgtacttctccttcgctcctcgcgtcgccaggtcgccggcatcttcaatcatgttggtgagcagcttgtgcagctccggcgcatctttggcggtaatgggcgagccgaaggcgccggagaaggcgttggcgacgccgccgccgctcaggttggcgtcttcaaccgccagcttaccgcgctcggtgccgcgcagcagacggcctttctcatacatcgcctgatcgtttaaaaacgcgatactgcccacttccggcggcggcggtagcagcgcgaggctgtcgatagcctgggcgttggtcaggtagtagagatcgggttttgtggtgacgtcgttaccggcgggaaccagggcgaaagcgttaagggagaagagactggccaggcaaacggcgagaacacgctttttcatgaaaacttccttacgttgttatatgtccagagaaaacagaatttatgcttgtcatatttctgtcattttttagtaaagggtaaaatcacgttgaaaaagcgggaccgcatcgcaaaatcgcttttttgtctgcttaatgagcaaccatacgcgatttcggactgtcgcacttaccactccgccatttgggcgctaccatatcgggattgcaatgacaggagatgtccatgagcgagcaagccattcgtttaacgcaatacagccacggagccggttgcgggtgtaaaatttcccctaaggtgctggaaactatcctgcaaagcgaccaggccaaatttatcgacccgaatctgctggtgggcaacgaaaccagcgatgatgccgcggtctacgatctcggtaacggcacgtcgatcgtcagtactaccgatttttttatgccgatcgtcgacaacccgttcgactttgggcgcattgcggcgaccaacgccatcagcgatattttcgccatgggcggtaagccgattatggcgatcgctattctcggctggcccatcaataccctggcgccggaaattgcccgtcaggtggttgagggcgggcgctttgcctgccagcaggcggggatcgcgcttgccggcggccactccattgacgctccggaacccatcttcgggcttgccgtgaccggcgtcgtcccgaccgagcgggtgaagaaaaacagcaccgcgcaggccggctgcaagctgtatctcactaaaccgctgggtattggcgtgctgaccaccgcggagaaaaagtcgctgctgaagcctgagcaccaggggctggcgacggaaaccatgtgccagatgaacctcgtcggctcggcgttcgccaacattgacggcgtgaaggcgatgaccgacgtcaccggcttcgggcttctgggccacctgagcgaagtgtgccgcggcgcgggcgtacaggcgcagcttacctatgcggatatcccgaaattgcccggcgtcgaagcctacatcgcggcgggcgcggtgccgggcggtaccgggcgtaactttgccagctacggccatttgatgggcgacatgccgccagcgtggcgcgatctgctgtgcgatccgcaaacctccggcggtctgctgctggcggtaacgccggaagccgaggctgaggtgcaggctgccgccgctgagtttggtatcacgcttaccgctatcggcgagctggttaccgcccgcggcggacgccccatgatcgagatccgttgatttcatgcggctgtttattgcagaaaaaccgagtctcggtcgcgccatcgccgatgtgctgccaaaaccgcatcgcaaaggcgacggctacattgagtgcggtaacgggcaggtggtcacgtggtgcatcggccacctgctggagcaggcccagcccgacgtctacgatgcgcgctatgcgcgctggaacctgctcgacttgcctatcgtgccggaaaagtggcagctgcagcctaaaccgtcggtgaccaaacagcttaacgtgattaagcgtctgctcggcgatgcgcaggaagtcattcatgcgggtgacccggacagagaggggcagctgctggtggatgaggtacttgactacctgcagctggcgccggaaaagcgtcagcaggtgcagcgctgtctgattaacgatcttaacccgcaggcggtggagcgggcgattaaccgcctgcgcgccaacagcgaatttgttccgctgtgcgtctccgcgctggcccgcgcccgcgccgactggctatacgggatcaatatgacccgcgcgtacaccatccttggccgtaacgcgggttaccagggggtactctcggtcgggcgcgtgcaaacgccggtgcttggcctggtggtacgccgcgatgaagagattgaaaacttcgtcgctaaagacttcttcgacgtcaaggcgcatatcgttacccccaaggatgagcgttttgtcgccacctgggtgcccagcgaggcctgtgaaccgtaccaggatgaagaggggcgactgctgcatcgctcgcttgccgagcacgtcgtcaagcgcattgaggggcagccggcgacggtcaccgcttataacgataagcgggactctgagccagcgccgctgccattctccctctcggcgctgcagattgaagccgcgaagcgcttcggctttagcgcgcagaacgtgctggatatctgccagaagctgtacgaaacccataagctgattacctatccgcgttcggatagccgctatctgccggaggagcattttgccgggcgccatgcggtgctgaacgcgatcggcgtgcacgcggcggatctgctgccgcagccggtggtggatccggagatccgtaaccgctgctgggacgataaaaaggtcgatgcccaccacgcgattattccgaccgcccgcagttcgcaggtaaaactcagcgacaacgaagaaaaggtttacggcctgattgcccgccagtatctgatgcagttctgcccggatgcggtgttccgcaaatgccagatcgatctcgatatcgccaacggcaagttcgttgccaaagcgcgttttctggcggaagcgggctggcgaaccctgctgggcaataaagagcgcgatgaagagaacgacggcatgccgctgccggtggtggcaaaggatgacgagctgctgtgcgaaaaaggcgaagtggtggagcgtcagacccagccgccgcgtcattttaccgatgcgacgctgctatcggcgatgaccggtattgcccgctttgtgcaggataaagacctgaagaaaatcctgcgcgcaacggatggcctcggtacggaggcaacccgcgccgggattatcgaactgttgttcaaacgcggcttcttaaccaagaaagggcgctatatccactccaccgacgccgggaaggcgctgttccactctttgcctgaaatggcgacgcgcccggatatgaccgcccactgggaatcgattctgacgcaaatcagcgagaaacagtgccgctatcaggactttatgcagccgctggtcggtaccctgttccagcttatcgaccaggccaggagcacgccggtacgccgcttccgcggaattgtggccccgggcgacggcaagaagagctttagcaaggggaaaggcagagccaaagcgaaagataaaaaaagcgccgccggccctgcggcggaaagtccgcaataaaaaaccccgggaaaccggggtttttcaattatgttccgaacccatatacaggggttcattcagcgagtggacttaaataacaccctgcgccagcattgcgtcggcgaccttcacgaaaccggcgatattcgcgccgcgtacgtagttggtctgcttcgcttcaccgccgtactcaacgcaggcgtggtggatatccagcatgatatggtgcaaacgggcatccactttctccgctttccagcccatacgcgcggcgttctgcgccatttccagacctgaagtggcgacgccgccggcgttggccgctttacccggcgcgaacagcacgcccgcttcgaggaacagatcggtcgccgcgatagtggttggcatgttggcgccttccgcaacggccttcacgccgttggcaatgagctggcgggcagcgtcgacgtccagctcgttctgcgtggcgcacggcagagcgatatccaccggcacggaccacggctgcttgccttcaaggtaggtcaggccgaactcgcgcgcgtaatccgccacgcggccgtggcagcgctctttaatgtcgatcaggcgcgccagtttttctttagtaaagccagactcgtcaaccacggtaccgttggagtcggaagccgtaatcacccgggcgccgagctccatggctttctcaatcgcgtactgcgccacgttgcccgacccggacaccgcgacgcgagccccttcaaagcccaaaccgtggcgcttaagcatcgcttcggtgaagtaaatcagtccgtaacctgtggcttccggacgaatcaggctgccgccgaaggagaggcctttaccggtgaagacgcaggcgctgttgttggagagcttacgcatcattccggccataaagcccacttcacgaccgcccacgccgatatcaccggccggcacgtcggtatccggaccgaggtggcgatacagctcagtcatcagcgactggcagaaacgcatcacttcgccatcgctttttcctttaggatcgaagtcgctgccgcctttaccgccgcccataggcagggtggtgagagcgtttttgaaggtttgttcaaagccgaggaatttcagaatcgacaggtttacagagggatggaaacgcataccgcccttatacgggccgatggcggagttgaactgcacgcgccaggcgcggttaacctgaacctgattgcggtcatcaacccaaacgacgcggaactggatagcacgctccggttcaaccagacgttccagcaaattcatctgacgatagcgcggattttcctcaaggaatggccacagggtggtcatcacctcgcgcaccgcctgagcaaattcagtttgatttggatcgcgctgttgaacgcgggcgagaaaaccttccagagtgcacgtctgatccatagatataagttccccttatggttgtggttgcgtctatttattatgattcggcccttgaaaaagccgattttccgactataccatcggaaatcgttagttaagcaaggaaaaattgttcagaaagcaaaatttataatcaggcggtggtcataatcaaaaacgatgacaaccacccgataaaattagcgggaatggagagcggcgcgctgggcgataaaggcttcgagcaggggaatatcggctggcgcaagagggaaggttaacgcctcctgcggtgaacaccagcgcagctgactgtggtagtgggcgattggttcgccgttaaaatgcggaacccaccaggcgtgaagatgtatcaggcgggcggacacttcgcgctggtggctggcgatgtagcattccggccgggcgtcgatcgccagctcctcccggagctcgcgcgccagcgcctgggcctgggtttcgccgggttcgactttaccgccggccagctcccacattcccggctgatccgcgtggggcggccgctgcgccagcagaatttgcccgttgcgttcgataatggcggcaacaacatcaagggtttttagcatgtgaatcatcgttctgtacgggataatggcctattatcaccgtccttgtccccgtcaaacaaccctgaattcgctggagagactttgtgcttgaccgtcatttgcatccccgcctgaaacctgtcctcaacgccgccgccgccctgctggatcgtccggctatctctcccgatggcctgacgctctttggctttgcgattggcgtgctggcgctgccgtttttagccctgggctggtatccggcggcgctggcggcgatcgtgctcaaccgactgctggatggcctggacggcgcgctggcccggcgacgcggattaaccgatgcgggcggttttctcgatatttctctcgatttcctgttttacgccctggtgccgtttggctttattcttgccgatccggcgcacaacgcgctggcgggcggctggctgctgttcgcgtttatcggtaccggcagcagctttctcgcctttgccgcgctggcggctaagcatcaaatcgataatccgggctacgcccacaaatcgttttattatctcggcgggctgacggaagggacggaaactatcgcgctgtttgtgctgagctgcctgtttccggcgtggtttgcgtggctggcgtggatgtttggcgcactgtgctggctgacgacctttacgcgggtgtggagcggatacctgaccctgaagcaggtaagagattgatgggcgggtttttcccggctgcgcttagccgggctacggggccacagtcgtcagcggtccggtgcgccagcgccgtcttcgggaaatgcgccgggaaggatgcctcccggcggttcatatggccaacaggcgaattacatactgctttccgggccgcgttccccgcgcgagaccgggtttttcgggttgctgctccactcgtaccagccgccgtcgtagaccgagacgttgttccagcccatcgcccgggcgtacataaaggtttctgaggcgcgccagccggtaccgcagtaaaaagagacctgctggttcggcagaatattccatgatttccacatcgcggcgatatcatctgcgctacgcatggtgccgtccggattatggaaatcctccatatgggtggagtcgcttccggcatggccccagcgggccccggcaatctcccccatcggcttgatatagctgtagccgctggtggtgccgataaactccggccaggaacgaatgcttaccagcgaggcgtcctgacggtgcagcagggcgcgagcctgctcggtattgagcatcagctgcggctgacccgggatcggcgcgccgaactccggctcgggcttctgcttcggcggcgttccgcgctcgaccggcagcccggcgtcggaccaggttttccagccgccgtcgagcaggcgtacatccttaaccccggcgtagagcatgatctgcgccacgcgggcggcggcatacacgtcgcgaccgtacaaaatcaccgcggtgtcatggcgaataccgtgttttgccagcatcgctttaagctgcgcgtcggagactttgttccatagcggctcgctctccacctcgttggtatcgatatacccggcgcccggaatatggctcagcagataaaacttcggcgcgccccaggcggcctcgaacaccttccagtgcccggcaggcgcggcggtgaccggtttaccctgctggaggtcgtgcagccactgcggatacaccagctgttcaaaatgcggcagcttctgcaggcggtccgcctggctcagggcgtcgccgagcgagctgaggtgagtgaaaccagccgccttaaggcgcgccgcgactttcgcgttgtcgtcggcgttgccgtacagcgcaatcggcgtagaggcctgcagattgtgcagcttagcccaggcgctcagctgttcatcgttcagcgagccaagccagctggcggcgaggttgagcgcctgcggttcatggccctgagggccgttggcgccttgcggccaaccgttatagaaagcgctaaggcgcgtatcaatagcgacgccgttgtgctgttgcagcgtggcaagcgttagcgttggcatggtgtcagcggcggaggtggaagcagcagcaagccccatcagcagggcgagtgcggtcaattgagaaacacgtttcatcgaaatgcccggcagtagaaaattgagcggcaattctccgcgaacaacgcggagaattctttgcgatagcgcaggctttcattgccagagccccatatgcaaacagcgtccgccggcgggcgtatcctggtcatcatgcgtgaccagcaccgcggggatcgcctgccgcgccagttcgttgaacacccagcggcgaaaatcggcgcgcagcgcaacgtcgaggcggttaaacggctcatccagcagcagcgcccgcggtcgggccagcagggcgcgcagcaggctgacccgcgcccgctggccgccggaaagggtggccggatcgcgcgtataaaaccccgccagaccggcgcgctccagcgcctgttcgacctgggctttgcgctgggggccgcggacgtcagcggcaagcgccaggagtaaattttgcccgacgctgaagtggtcgaacagcagcgcgtcctggaacaggatgccgatgcgccgtcgctcggtgggtaaactgtcgcagcgctggttatccagccacagctcgccggcggcgcgaaaattctccgccagcgcgccgaccatccaggcgaacagggttgatttaccgctgcccgaggggcccatgagggtcagtatctcgccgggagcaacggaaaagtcgacgttgcgcagcagaggctctccgttgaggctgagagtcaggtttttgacgatcaacattagcgtaatccttgtcgatagcggccggtcagccaggccagcagcgcggtggcggcaaaaaacagcgccggcagcagtagctgccatagcgcctgcgcggccagagtggacgtctcgccgccgctgctcagcgcgacggcttcgctggtgagcgtcgggaaccgtccgccccccagccataacgtcggcagatattgcgcgatgcttaccgaaaagcccaccgccagcgcggtcagcagaggacgcgtcagggcgggtaaggtaaccagccagaagatgcggcctcgttgccagccgagggtgcgggcgagcagctccatgcgcgggtcgcgagcgcgccacgcgggacgcagaataaacagcatccacggcacgacccacagcaggtgcccccataaaacggcgacccactcgccgtccagccacgtatacagcgccagctgatattggccgtctaccagcggcagcgccggtaaaatcagcggcagccagatccatccgtcgaaacgggaagggccagacgccagccacagcaggcagataaccgcgccgagcgacgctgagcagagtccaagccacaggctgttgccgacgctatcgctgaccggctggctattctgcgccgccgcggcaagcagcagggcgcaggccacgccgcacagcggcagaagaagggcgaagcttttcccggcgagcgcccgcggctgcgggtggcggatcccctgaacctgcgggatccgccgtcgccagagacgccagactccccacgccgccagcgccatgatggcgagcgtcagcagcagtaccaggctggcgagggcgcctttcgcctgctggatctcatcgccctggcttaaccattgccaggccagcaccgccagcgtcggcgggttacccgggccaatcaccagcgcgacgtcgaccgccgaaaggctccaggcggcggtggccagcagcgctatcgacagcgccggaagcagcgtgggcaagactaaccatttcaggcactgccagcgtccgtagccgaggctttttaataccgtcgcctgtccggccaggcgtttctcgcctaacaggccataaaccacccacagcagaaacgcgctctctttgagcgccatcgtcaggcccagtccaatgccgtagcggtcaaccggcggggtaaaaaagggcaacaggcgcgggagccagccgccatcggcgaagagcagcagggcggcggtggcgaaggccacgtgaggtaccgccagcagcagagggagccttgcggccagccgccgccagccgcccgacggccagagtgcggccacgacggtgagcgtgatgatcagcgcgccgccaaccgatagcagagttgagacgagagtcgccgccagcgcctggctgaattgcgggtcggcaaacagcgacagccagcgcgcgcggcggagcgccggaagcgccatcagcgcagcggccggcagcagcggcagatagatcagcgcgacggcggcccaggccagcagccttagtgcgtgccgtagcggcgcagccattcctgctccagcgcgtcaacccaggccgcgtgcggttcacccagcatcggcggcatattctgcggcacaacggcgttaaaggcctgccgctcagtctcggttaatttcgccggatccagcacgctggggtccccccacaccgtcgggtcggccttgcgtagctgggcctggggcgagagcaggaaattcgcgaccactttcgcccccgccgtcgcccgggcattggccgggatcgccacaaagtggacgttgccaagcatcccctcgcggaagccgaaaccgtagctgtctttcggcagctcgccgctgaccgctttttgctgcgcgtgcagcgggttaaaggtgatggacagcctgagggtcccatttttaagcatggcatccatgcgggcgggcgaagccgggaagtcgcggccctggcgccacagcagaggatgaagccgatcaagatagtgccacagcggcgcggtcacggcggcgaaggtggcctcctcaggcggctggcgtagcgcgtcgggccgcggagtcagcgtcagcagcagctgttcaagaaacgcggtaccggtaaaatccggcggacgcgggtaggtgacgctgccgggatgcgcggcggcgaaagccagcagcgcctgcggagaggtgggcccgtcgggcgtttgtgatcggcgggcgataaaagtgagctgcgcgccgccccacggcgactcggcgccgtcggtggggatggagaaatcctcgcgcaccggcttttgcgtatcgacaaagcgccagttgggcagggtttccgcccaccgggtttgcagcagcctggcgtttttcagggtgcggaagttttcgccgttgacccacagcagatcgatggaaccgcctttactgcgtccggcgcgggcttcggtctggatgcgctttaccgcgtcggcggcatccgcaatatgcacgatgcgcaggtcgatagcgtagtcgcgctttacctcaccgctgacccagtcgagatagcggttcaccgccggatcgccgccccaggcgttaaaccacaccgtctggccgcgggcttcttgttgtagggattgccagccggcgctggcggccagcggggagagcaacagcaaagcgaagaccagcacactgcgcataaccactccttatggttttgaatcggttgggatccggcacaatccctgggcggggatcgccatggccgaattaaagcgcgccgacaggttttgtaaaccgatcagcgccgtgagttcggtgagcgcgcgggcgtcaaactggcctgccagcctgtcgcgcagcgcatcgtcgaccaccggcggcgtcatgctggccgcctcggcatactccagcgccagccgctcgcggtcgctgaacagcgcgctgtcccgccattcggcgaccgccagcagcttagcgctgccgccgctgcgttccgccagcttcatattggtgatatcaatgcaaaactcgcacaggcacagctgcgcgacgcgggcgctgaccagcgatctcagcaccggatcgaggggcgaacgcttgcgttccagatagccgacgaacatcgacaccaggtaaaacaccagcggaatacggccccaccagcggatagggctgagcacctcgccgtagtggcgacgatgcagccaggcctgcgggcgaagaatcagcggaatggacttcagagggggtaagctcatcgtgaacgcctcttttgttgttcaagatagagcgctttcgcgacgaccaccacaatcgccagcgcaaacaggatcgataaaccggtcaccagccagaatgtgccgccggtcagcaggctgccggtccacgaatagactatcgtcgcgggcagctggccgagaccggtggccagcataaagtggcgaaagcgcattgacgtcagcccggcggcgtagctcaccgggtcgaagggaacgaaagggagcagacggcagattaatatggtgtgtttgccgtagcgggtaaaaaagccatccgtactctgcagtacgctcttgccggtgagcttttccaccgcgtcgcggccgagcgctctggcgataaaaaagcacagcgccgcgccggccatcgcgctcacccacgacagcgcgccgccccagaaggcgccgaacagggaagcgttagcgaaggtgatcaggaaggcgggaagcggggcgataatcgcctgcaaaatcatcagggcgaaggagaccagcgccgcctgcgggccccaggagtcgataaagcgttcaatagcctgctgatcgagcgtggcaaaagcggcgaggctgcgctgcataaactcattgacgccgggtatcagccaccatgccagcagaagcgtaaacagcgtcatgccgatggctatccggtagcgcgcgttgctatttttcatcgttagcctgtatccgtgatgtctcgattcgccgatagcgggcatagcttttcgccgcctgaatcaggacaaataaagccagccccgcgagggtcagcttcagtataaacaggggggtgataccctcgcggataagctcgctggccatcagcgtatagataaatatgccgggcaaggtggtgagggcggaaataaaggtaaacgtccagaacggaatcgccgtcaggccataggcgtagttctgaacattatagggaaacagcgggatgagccgggtcagaattaaaaaatcggtgccgctacgggcgatgcctttttcaatggcctgaaatatcgccgtctgcccgacgtatttaagcagcagctcgcggcccagccagcgggcgaacagaaacgacgcggaggaggcgagcgtcgccgccagcagcgatagcaaagttcccgccagcggaccgaaaatcaccccgccggcaatcactaaaagagtgcccggtagcaaaaacagggtggcgacgataaacagcagaatatagagcgtatagccgaaggcgccgctctggcggatcatttcgcgcagacgatcaaaatgggtaaccagcccggcaaaacccgactgctgaataagacaggcgacaatgctcaatatcaccacaacaaaaagcagcttatattctgctttatgacggcttcttttgcattgggttctcctgtatggcgcgggcggtctgaagtgcgcgcgacagtataatagtttgccgccgttcacaatctctgacggcggcttttttgatatggctcaggctctccggacgggagagcctgacggagggaatatttagactttaaaggtcgcccataccggcgcgtggtcggacggcttttccattgcgcgaatttcgtagtcgataccggtttcgatgcagcgctgcgccagcggggtgcttgccagcagcagatcgatacgcagcccgcggttatcgtcaaagcccttagagcgatagtcgaaccacgagaagtgttcgttatcctgcggattcgcatggcggtaagtatccaccaggccccagctcagcaggcgctccatccattcgcgctcttccggcaggaaggaacacttgccggtacgcagccagcgcttgcggttctcttcaccgatgccgatatcgagatcggtcgggctgatattcatgtcgcccatgatcagtaccggattctctttattcagttcggtatcaaggtagttttgcaggttctgataaaacgccgccttcgccgggaatttggtttcatgatcgcgactttcgccctgcgggaaatagccgttaatcaccgtcacgttgccaaacggggaagggatttccgccatgatgatgcggcgctgggcctcttcaccatcgtttgggaaaccgcggcgcacggagatcggcgtctctttggtcagcagcgcgacgccgtaatggcctttctgcccgtgataaaagacgttatagcccagctttgccacctcttcgagaggaaacatatcgtcgtgaactttggtttcctgtaggccgatgacgtcgggctggtgtttatcgatgatggcggccagctgatgcgggcgggcacgcaggccgttgatattaaaagagacaaatttcatagtcgctgccactgtgcaaggtgaatagtgcagggatggtagcagaaattcgccgggctggctgcgcaaaggcgctttattctgccgattgcagcggttggtagcctgtttgcacaaactgtgcaccattctggaacgcgctgcgccaaaaaagggcgattattgccgataaatttcgtcaaggatcacaattacagaattatatcttacccctgcataatctttctttttattccactgcaaaagcctcttttagtatttttattcactttttatgcattttatgtgaataacggtatttcgtaacttattgatatttcgttgacgacctcgatttatgcatttttacctctggctggcacgaaccgtgcaatctacatttacagcgtaataaccatattcattaacattatttaaactttttatttaccggaagaggtcgatatgtctcagtcaattacgcgtagcaactttgatgaatggatgatgcctgtatacgcgccagcggcttttattccggtacgcggcgaggggtcacgcctgtgggatcagcagggaaaagagtatatcgattttgccggcggcattgcggtgaacgccctcggccacgctcatcctcggctggttaaagcgctgaccgcgcaggcggaaaagttctggcataccggtaacggctataccaatgagccggtattgcgtctggctaagcagctgattgacgccacttttgccgaccgggtctttttctgtaactccggggccgaagccaacgaagcggcgctaaaactggcgcgcaaatatgcccacgatcgtttcggcagcgagaaaagcggcatcgtggcgttcaagaatgccttccacggccgcacgctgtttaccgtttccgcgggcggccagccggcctattcgcaggattttgcgccgctgccgccgcagattcagcacgccatctataacgacctcgactcggcaaaggcgctgatcgacgacaatacctgcgcggtgatcgttgaaccgatgcagggtgaaggcggcgtcgtgcctgcggatgcggacttcctgcgcggcctgcgtgaactgtgcgatgagcacaacgcgctgctgattttcgacgaagtccagaccggcgtcggccgtaccggggagctgtacgcctatatgcactacggcgtgacgccggacgtgctttccaccgcgaaagcgctgggcggcggtttcccgatcggcgcgctgctggcatcggagcgctgcgccagcgtgatgaccgtcggcacccacggcacgacctacggcggcaacccgctggcctgcgcggtggcgggagaagtgtttgccatcgtcaacacccgcgaagtgctcagcggcgttaagcagcgccatcaatggttctgcgaacggctcaacgcgattaacgcacgttacggcctgtttaaagagattcgcggcctggggctgcttatcggctgcgtgctgaaggatgaatatgccggcaaggcgaagaccatcagtaatgaggcggcggaagaggggctgatgatgctgatcgccggcgccaacgtggtgcgtttcgctccggcgctgattatcagcgaagaagagatcaacgccgggctggatcgcttcgaactggcctgcaaacgctttctcgcgggggtctcatcatgatggtgatccgtcctgtagaaaaaggcgatctgccggggctaatgactctggcgggcgagaccggcggcggcctgacgtcgctgccggccgatgaagccacgctggccgcgcgcattgaacgttcgcagatgacctggcgcggcgagctgccgaaaagcgagcagggttatgtgttcgttcttgaggactgcgccagcggcgcggtagcgggaatttgcgccattgaggtggccgtggggcttaacgacccctggtacaactatcgcgtcggtacccaggtgcacgcatcgaaagagcttaacgtctacaacgccctgccgacgctgtttctcagtaacgaccataccggcagcagcgaactgtgtacgctgttcctggacccaaaatggcgtaaagagggcaacggctatctgctgtcgaaatcgcgttttctgtttatggccgcctttcgcgaacgtttcaacgataaggtcgtggcggaaatgcgcggcgtcattgacgaacacggctactcgccgttctgggagagtctcgggaaacgcttcttcgcgatggagttctcccgcgccgactacctgtgcggcaccgggcagaaggcgtttatcgccgcgctgatgccgaagcacccgctgtatatcgactttttaagcgacgaagcacgagcggtcatcggcgaggtccatccgcaaaccgcgccggcacgcgcggtgctggagaaagagggatttcgctatctcaactacgtcgatatcttcgacggcggcccgacgctggagtgcgaaattgaccgggtgcgggccattcgcaaaagccggctggtcaccgtcgttgaaggccagcccgcgccgggcgagtggccggcctgtctggttgctaatgagcagtaccagcagtttcgcgccatgctggttcacgccgacccggagagcgaccgcctggtgctaagcgcgcgcgagctggatgccctgaaatgccaccccggcgaccagattcgcctggttcgtctgtgccctgaggagaaaaaatcatgagtttatggattaacggcgactggcaaagcggtcgcggcccggcccgtagtaaacataacccggtaagccaggcgctgctgtggcagggcaacgatgccgatgccgggcaggtggcgctggcggtcaccgcggcgcgcgcggcgtttcccgcgtgggcgcgtcaaccgtttgccgcccggaaagcgatagcggaaaagtttgcttcgttactggaagcgaacaaaggcgaattaacccggattatcgcccaggagaccggcaaaccgcgctgggaagcggcaacggaaattaccgcgatgatcaacaaaatcgccatttcggtgaacgcgtatcatagccgtacgggggaagcgcagaccgcgatggcggacggagaggcgacgctgcgccatcggccgcacggcgtgctggcggtctttggcccctacaattttcccggacacttgcctaacgggcatatcgttccggcgctgctggcgggaaataccgtggtattcaaacccagcgagctgacgcctcaaagcggagaggcggtggtgaagctatgggccgaagccggcctgccgccgggcgtgcttaacctgctccagggcgggcgggaaaccggcgaagcgctgagcggccaggcggacatcgacggcctgctatttaccggcagctctgcgacgggttttcaacttcatcgtcagcttgccgggcagccggaaaaaattctcgctcttgagatgggcggcaacaacccgctgatcgtcgatgacccacaggatatcgacgccgcggtccatctgaccattcagtcggcgtttattactgccggacagcgctgtacctgcgcgcggcggctgctggtaaaacgcggccagatcggcgatgcgtttcttcagcggcttgtgacggtgtcacaaacgctgattcccgacgcgtgggacgctgaacctcagccgttcctcggcgggttaatttcagcgcaggccgcgcaaaaggtacatcaggcctggctggcccacgtggccagcggcggaaaaaccctgctggagccgcgcctgctgcaggccggaacctcgctgctgacgccgggtattatcgaaatgagcgcggtggcgcaggtggccgacgaagaggtcttcgggccgctgctctgcgtctggcgctatgaccatttcgatgaggcgattgccctcgctaacgcgacccgtttcgggctttcctgcgggctgatctccgccgaacgcgacaaattcgaccagctgctgctggaggcgcgggccgggatcgttaactggaacaaacccttaaccggcgccgccagcaccgcgccgttcggcggtaccggcgcttccggtaaccaccggccgggggcgtggtacgccgcagactattgcgcctggccgatggccagtctcgaatcaccggagctggcgctgccggcaaccctcagccccgggctgaatttccgtaaggagacatcacaatgaaagcccgggaagtgaactttgacgggctgccgggcctgacccaccactatgcgggtttatctttcggcaacgaagcctcgacgaagcaccgctatcgggtgtcgaacccgcagctggcggcaaagcaggggctgaaaaaaatgaaagcgctggcggatgctggctatccgcaggcgctgatcccgccgcaggagcggccaaacattccgctgttgcggcagatcggttttagcggtagcgatgagcaggtgctggaaaaggcggcgcgccaggcgccggaactgctctcggcggtcagctccgcgtcatcgatgtgggtggctaacgccgccacggtctcgccctcggccgattcgctggatggccgggtgcatctgaccgtcgccaacctgaacgataaattccatcgcgccagcgaagcgccgaccaccgaagcgctgctgcgggcgattttccccgatgagcagcggtttgctgtacacggcgccctgccccaggtatcgctgttcggcgatgaaggggcggcaaaccacaaccgcctcggcggcgactacggcgcgcccggcgtgcagctgtttatttacggccgccagcaggggggcgaagataatccgctgcgctacccggcgcggcagacgctcgaggccagccaggccgtcgcccgcctgaatcaggtcaatccccggcaggtgattttcgcccgacaaaatccggcggtgattgataagggcgtgtttcataacgatgtgattgcggtaagcaatcagcaggtgctgttttgccacgagcaggcgtttgttgaccagccgcagctcctgcagcagctggcgcagcaggtctccggctttacgccgctggtggtgccggcgagtcaggtttcggtggaagaggcggtggcgacctatctgttcaacagccagctgctaagcaaagaagaaggcgggatgcggctgattttgccgctggaagcgcaggaacacccgggcgtctggcgctacctgaaccggctggtggagggcgataaccccatcgatgagctacaggtttacgatctgcgcgaaagcatggccaacggcggcggcccggcctgcctgaggctgcgggtggtgctgacggaggacgagcgacaggcggtgaatccggcggtcatgatgaacgatacgctgttcgccacccttaatgactgggtagaccgctactatcgcgatcgcctgacccaggtcgatctcgcggatccgcagctgctgcgcgaaggccgcgaggcgctcgaccgcttaacgcaaatcctgcgcctgggctcagtgtatccgtttcagcaataaggaggcgtcgtggacgactttctggcacttactctggcggggcgtctgccccaccatttccatggtcaaaccgcgcatttccgctggcactggattgactgcggtattctgcagctcattcctcatgaaccctgcgatcggtcattggttttgtcatccgggcttcacggcaatgaaaccgcgccggtcgaaatcaccgatttactgctgcggcagctgtttcgtggggaaataccgctccgctggcggctgctggcgatctttggtaaccctccggcgctgcgggccaacaagcgctatatgcacagcgatatcaaccggatgttcggcgagcgatggcgcgcttttagcgccagcgatgaaaccgttcgcgcccggcagctggagcatgcgctggcgcgattttatgccgggacgcccggcgagcgctggcacctggatttacataccgccatacgcggttctctgcatacccgctttggtgtcctgccagcgcgggatacgccgtgggatgaagcgtttttgcgttggttaggggctgcagggctggaggcgctggtgtttcatcagcagcctggcgggacttttacccatttcagctgcgaacgcttcggcgcgcgctcctgcacgctggagctcggcaaggcgctaccttttggcgaaaacgatctgcgcttgttcgcgacgactcaacgcgcgctgtcgctgctgctggcgggagaagtggcggcggaagaggcgcacgcgccgctgcgctacagggtggtacagcaaattacccgcagcagcgacagtttccggctgcatatgtcggcgcagacgctgaactttacgccgtttgccgccgggacgctgcttgctgaggatggcgatacccgctacatagtggaaagggagcaagagtacgttttgtttcccaaccccagcgtcgccttcggccagcgcgccgggctcatgctggagcgcttccggtgaatccgtcgcccgtccgggcggcggcatttatttcagcgtttatttttccgcagccatcttattttttcgtgctctgtccattgattgcagattattcctggttaaatgctttgtttttaatctccgctgatttataatcttcataatttcccactaaaacagttgcttatttattttctattgcatttgttccctcattttccttattttctccataattggcgagaaaatgttttttacactttcaatgttttacgcttgctctgattaattgacgataaacgtcgtaaagttaatctcgtcaacacggcaacgcgccgtaagaataacgcaaagtaaggattgaactatgaagaagattactgcactgtttgttgcctctactctggctctgggcgcggctaacctggcccacgcggctgacgctactgcaaccccaaccgataacgcgccgatgatgcatcataagcgcggacctgcgggcccacatgaaatgatgtttaaagggctgaacctgaccgatgcgcagaaaacgcaaatccgcgacattatgaagagccagcgcgacaacatgaagcgtccgtccctggatgagcgccgcgcgatgcatgagctggtagccagcgataccttcgataaggcaaaagcggaagcgcagattgataagatggaagcccagcataaagagatggcgctggctcgtctggaaacccagaataagatttacaacattctgacgccggaacagaaaaagcagttcaatgccaattttgagaagcatctgacagatcgtaaagcgccggaaggtaaaatgcctgcacctgctgaataactcagcgcgctgacttaagaccgccggtcttgcccaataacgccaacaggctttgggcaggaccggcggtttttctttatctgtagcgacaagctgatttacccggcagggacgaatgtgccagtatgagtgccatcgccacggactctggtgtcctggtctaaagcctactctgctcatggatcttgcatatggaaatgtatatcggcctcgccgtcctcgttgtcgtcctcatctgggtcgtgatgacctataaccgctttatctccctgcgacgtttcaaagacgaagcctggagcggcattgccgtacagcttaagcgccgccacgacctggcgccgaatctgctgagcctggtgaaacgctatgcgcagcatgaaaaagaactgctggaagagatctcccgccagcgcggcgaactggtcggaagcacccgacagatcgccgacagcgaacgccagtactcgggtacgctagggcgcgttttcgcgcttggcgaagcgtacccggaacttaaagccagcgaaaactaccttgccttacagcaatctctcagcgaaatagaagagcagctgcagatggctcgccgctacttcaacggtacggtgcgcgatttcaatatcctggtcgagtctttccccagcctgctgctggcgcgactgtttaattttcaaacggaagtgttcttcgagctggactcaccagaagaagctaaatcaccgcggatggcgtgattaaatggcgaatttactttttcgggggctgcgcaccctcgtcctgctgctgcttctgaacatcagcgcggcttttgccgccggcgacatgatcatcatcaaggatgcttcccagcttcccgctggcgctattccagcgtatgaacatatcctctctttcgatgcccgggcgcgctttaacccggacggtagcatggagatgcgggaaaatatcaaagtactttctctgggcaggcagattcggcggggaattttccgtacgctgcccctgacctggaaccgccaggacggcaagatctttcgcgtgtattacgcgatcgagtcggtgtcgcgcgatggcgtgcctgagccgtttagccttgatgaagcggaaaaaaacctgacggtacgcattggcagcggcgaacggctcctgaaaccagggatctataactacgagattcgctatcaaatcagcaaccatttcagccgcttccccgaatgggatgagctttactggaacgtgacgggcaatgactgggcgtggcctatcagcaaggccagctttcgtcttgaactgccggacgccgccggaaatctcaacgccgacgctaaggacgccagagtgcggtcgcttgatgtttataccggcgtcgcaggggcgaaagaacacaacgcgcaggtgcttcctgacggtagcgtccgcaccctgcggcctctggcgcggggggaggggctgaccgtggtctatacctggcctcggtcgatccttgccgatgctccggcgccggaggccgctttgccgctggtgcatctccttatccccaccctaaaaaccggcgtggtctggctacctctgctgctgatggccgcttattacctgatctggtggcgaaaaaacgtcaccaaagccgggctaaaaatgccgccggtcgttgcgctttattcgcctcctcccggcatgtctccgggctacctgcgttttatcacccggcgtaaatatgatgatgtggcttttagtagcgatttattagcgctggtggctaaacgcggaatggcggtcagcggggacagtcaacacacccctaacccgtggcttgcgaacgccggcgtaaaacagcggctgacccgtttgcccgtcgagggaaaccggcaattaaactatgatgacaggcagctattaagtacgctttttaaaggtaaacaaaaaaatatcgatctcagcaaggcccatcagcgatcgatgcagacagcgcgtgaagagcaggaaaagcgttgtgaagcgcagcgggataaattatttcgcaaatgggggcagccgctgcggcgctgcatctacattgcgctgttggtgccggtggcctgcggtctttgggttaatacggaggccgcgctgctgacgataccggccgcggtttttatgctgattggcggagcgatgctcgcctgtttgctgcgctttatatgccgcccgcgggaaatgtggcgtgcctgggggccggtgccgctcttttttttggcgatcttcggccccttcgcgacgctgggaggcgggatttttctctttggtatactgcccatcacccagcttccgtcaggatacattggcgcgcttatggccgcgctggtgctctgcgttttcgtggcctggaaaacgcctcgctatacgcagcgcgggcttgatgaactggctatcgcgaaaggattgatgcgctatctgggcaccgccgaaaagcatcgttatcagattatctatccgcccgagcagatgatttcccattttgaagcgctgctgccggttgccctggcgcttggcgtagggaaaacatgggcaaatacctttgcccactacctgagtagtacaggcgccgtgtcgcatgcgtttgccggcgccgactggggaagcgtccaccacttcagcgaagcctgccgaaccgcctctatgtcaacgccggatagcggttcagggaacggttcatcatcaggttccggttacagcggctccggttcctccggaggcggttcatccggaggcggctctggcgggggcggcgggggcggctggtaattgccccgatagcgcatcggggctgacattcgcctcacagaggatggagcttatagcggccgctgagcagcggcttacacaatattttataaccgtcatggtcaaatttggccgacaggcgcgtgagtgatgacgcctgcgacagagactctaccgcgccgagccaaagccagttttgaataatgtggtattgggtcatatcctcgctgctctcttccagcgcgatcgccccggcccagggccagcataccagctgcatcttttgcatattgtcgaccagacgctgctggtgtgcttcaacgctctcttttccgcaacaggcgcccgcgcagcggccgagcgccgaacgaaagcaggcccgcccgcggttgagcggctcgaggcccattaatccgtagcacaggcgatgctcgtcggcaattttttgcagcgcctgcagcgccgcgcggcggttggcaaaaagaccatagagatcgctttgcagggaaaaatccagctcgctggcgtacaccacctgcggacgggcgtcagccaggcgtaatgaacatagctgtcggttttgccgcagacgcttattgaatagcggctgctgttctttaatgagctgtgcctctaataagagtgcgcccagctctcccgccgttcgttgccaggtaatgcgccgggactggcgcagcatcgccgcttcgtcgggcgtgcgcagatgcgacaacacccggctgcggatattcacgcttttcccgatatagagcggtagggtatcgctttcgccgtggaacagatacacccccggctgcctgggcaaagcctcaagccacggacgcagatgttcgggatactcataaattgccgccgcttcaaattcgagacgcggggcggattgccttcttgccacttttgctcctggtgctggttatttatccagtatagcagccgaaggaagaggcgaaaaggataaaaaatcgccccgaaccgggtcggggcggagggggagaggcgaattactttttccagaagtcgtcgaagaccgtaatcggcggtcggcgtttatgctcggttttcaaataccagccttcaatcgttttcgcaattttctcatccagcgctttgccttccagataatcatcgatattttcgtaggtcacgcccagcgccacttcgtccggcagggaggggcggtcgtcctcaagatcggcggtcggcagctttttatacagatgctccgggcagcctagctgggccagcagctgtttgccctggcgtttgttaaggcgaaagatagggttaatatccgtaccgccatcaccgtatttggtgaagaatccggtaatggcttccgctgcatggtcggtacccaccacgacgccgtgggtcattccggcgatgctgtactgcgccttcatgcgttcgcgggctttttcgttaccgcgaacaaagtcgctaagttcaatcccggcctcgcgcagcgcctgttcgctggccagcacggcgcctttgatattgaccgttaatacgcgatccggctgaataaaagcgatagcgtcctggcagtcctgctcatccgcctgcacgccgtagggcaggcgcacggcaataaactgcaggctgctgtcaccggtttcggcacgcagttcgttgatggctaactgacacaatttaccggttagcgttgaatcctggccgccgctgatgccgaggaccagtgatttaataaaagggtatctctgaagataggccttcaaaaagtctacgctgcggcgtatctcggcttcgacatcgatctggggttttgcgcccagcgcctgaataatctcttgttgtagcgtcattgcgccctccgggaagtgaatctgtttgccaataagcagtggtttaacctacctctttgccggtaaaacgacaaggatcacaattttgagtgaagcaaaagcaggcaacctcaacaagaggggatttattattggaaagctcttaatttcgcttcatttccaccttcggcttgaaaaataacgatatttattccaggcttattaacacgccaaaaaaaagaggatggtatatgaacaagcattttgcaggatttctgggcgcagcagcagtattgaccctgctggcagggtgtacggcctacgaccgtacgaaagatcagttcactcaacccgtggttaaagacgttaagaaaggcatgacccgcgcgcaggttgcgcaaattgccggtaaaccttcatcagaagtcaccatgatccacgcgcgcggtacctgccagacatatatcctgggtcaacgcgatggtaaaattgaaacctacttcgttgcgctggatgaaaccggccgcgtgatgaattctggctatcaaacctgcgccgagtacgataccgacccgcgcaacagtaagtaacgccccgccatagtgctgattcctacgaaagcccgaccagtggtcgggtttttttatgagttctgatgcttatttaattgcgcgaattatttgagggaaatgtgaaggcagtcaaaacgcgaggtcaatgagagacaattctgttcaaggaggaattatcctgctgccgatcgatgccgtatactcaatgcataaacaatactaattcaaagaaacatctcttaccgcctctcaggcatcaatgctgcagagaggaccgggtcacacaaattgaggaagcgttcatggaaaagaaacatatctacctgttctgttctgccgggatgtcgacatcactgctggtatcgaaaatgcgtgcccaggccgagaagtatgaagtgccggtgattattgaagcatttccggagaccttagccggtgaaaaaggacctgatgcggatgtcgtattattaggcccacaaatttcctatatgctgccggacattcagcgtttactgccaaataaacccgtagaagtcattgattctgttttgtacggtaagatcgatggtttaggtgttctgaaagcggccgttgcggccattaagaaagctgctgcacaataattttattttaaaactcgacatatttcggatagcagcggttagaatttcgtgagggtgtgttttagctgctcgctgtccgaaatacccagagtttattttcccgtcaaagagtaatttcatctatcattgccgcagtgactatattgcggccttaaagggtatttattatgagtaaagtgattgactcgcttgaaaaggtactcctgccttttgccgtcaaaataggaaggcagccccacgtcaatgcaattaaaaacggctttattaagttaatgccattgacgctagccggggcgatgtttgttttaattaacaacgtatttttgagctttggcgacggctcattcttttattcaatgggcatccgtctggatgcgtctacaatagaaacgcttaacggttttaaagctatcggcggtaacgtttataacggtacgcttggcattatgtcgctgatggcgcctttctttattggctccgctttagctgaggagcggagagtagacccgatggccgccggtttactggccgttgcggcatttatgaccgtcacgccttatagcgtcggtgaagcctacgccgtgggcgcgaactggttaggcggcgccaatatcatttctggtattgtcatcggtctggtcgttgccgagatgttcacctttatcgttcatcgcaactgggtgattacgctgccgtccagcgtgccggcttcggtttcccgttcattctctgcggttattccggcctttatcatcctctcgattatggggattatctcctgggcgttgacccactgggggactaacttccaccagatcatcatggacactatctccacgccgctggcttcaatgggcgccgtcgtaggctgggcatacgtcattttcacctcgctgctgtggttcttcggcgtacacgggtcgctggcgctgtcagcgctggatagcggaatcatgacgccgtgggcgctggaaaacatcgcaacctaccagcagtacggttccgtcgaggccgcgctggccgcgggtaagagcttccatatgtgggccaagccgatgctggattcctacatcttccttggcggtaccggcgcgactctgggcttaatcatcgccatctttatcgcttcacgtcgtgaggatcatcgtcaggtggcgaaactggcgctgccgtcaggcatcttccagattaacgagccaatcctgttcggtctgccgatcattatgaacccggtgatgtttatccccttcattctgattcagcctctgctggcggctatcaccatgacggcttataccctgggcatcatcccgccgattaccaatatcgcgccgtggaccatgccaaccggtttaggcgccttctttaacaccaacggtagcgtagccgctctgctgctggccctgttcaaccttgccgtgtccaccctggtctacctgccgtttgtggtgatttccaacaaagcgcagggcgtcattgagcaggaagagagcgaagaagatatcgctaacgcactgaaattctaatattgaacggtacgggagatttcccgtaccgtcctggaaataagggagtcattatgtttgatctggataacatcgcagcagaagagaccgcggtaaacgacctcgaagaggtggtgatggggctgattatcaactccggtcaagcgcgcagcctggcttatgccgcgctgaagcaggcaaagcagggagatttcgaggcggcgaaaacgatgatggaacagtcgcgcatggcgctgagcgaagcgcaccttgtgcagacgcagctgattgagagcgatgagggtgaaggcaaaatgaaggtgagcctggtgctggttcatgcgcaggatcatctgatgacctcaatgctggctcgtgagctggttgccgaattgattgagctgcacgagaaggtacaataggtcatcgacacgatgaggcagccaaagatgatgaccactgaaatcagtaccgcccgggagcaacaactctttaacggcaagaactttcatgtggtcatctataacaaaacggagagcgtaagcgggcttcaccagcatgattactacgagtacaccatcgttttaaccgggcgctattatcaggttattaatggcaagcgggtgctgctggagcgcggggattttgtcttcatcccaatggggtcgcatcaccagagtttttatgaatttggtgcgacgcgcattcttaacgttggcatcagcaaaagtttctttgagaaacactatctgccgctgctgccgtttggtctggtcgcctcacaggtctatgccgttaaaagtacttttctcagttatattgagtcggttattgcatcactgaattttcgcgaaactgaattcgacgaatttatcgagctggtgtctttttacaccctgaatcgtttgcggcattatcgtgaagaacctacggaagacgttattccgcaatggttaaaaaataccgttgagggtatgcacgataagcttaaatttggcgagggggcgctggaaaatatggtcgagctttccgggaaaactcaggaatacttaacccgggcgacccagcgttattacgccaaaacgccgatgcagatgattaacgatattcgcatcaacttcgccaaaaaacagctggagataaccaactactcggtgaccgatatcgcctatgagtcggggtacagtagcccaagtctgtttattaaaacattcaagaagctgacttcttttacccccagcagctatcggaaacacctcaccagtattaattaaccgggcgcggaatagtccgcgcggtctaaatattcaaattaactgtccgtatttaaacggagagcgggtgccgcatacgcgctatccgcaagggagaaaaagatgagccagaaattgaaggtagtgactatcggcggcggcagcagctataccccggaattactggaaggattcctgaagcgttaccatgaactgccgattagcgaactgtggctggtggacgtcgcggaagggcaggaaaagctcgatataatccacgcgctgtgccagcgcatggtggaaaaagccggcgtcccgatgaaagtctacaagaccctcgatcgccgcgcggcgctggaaggcgcagatttcgtcaccacccagctgcgcgtcggccagcttaaggcgcgcgaaaaggatgagcgtattccgctgagccacggctatttaggccaggaaaccaacggcgcgggcggactgtttaaaggtctgcgcaccattccggtcatttttgacattgtgaaagatgtgcaggaagtctgtccgaacgcctgggtgattaactttaccaacccggcgggtatggtgaccgaagcggtttatcgtcataccggctttaagcgctttatcggcgtatgcaatattcctatcggcatgaagatgtttatcaccgatgtgctgaagctgagcccgagcgatgagctcaatatcgatctgtttggtctgaatcatctggtgttcgtgcgggatgtgctggtcaacggcgtttcgcgctttgacgagctgcttgacggcgtggcgtcgggtcgattgagcgcaaactcggtgaaaaatatctttgatttgccgtttagcgaagggctgctccgttcgctgcgcctgatcccttgttcctatctgctctactactttaagccaaaagagatgctggcgattgaaatgggcgagtactacaaaggcggcgcccgcgcgcaggtggtgcagaaggttgagaaacagctgtttgagctatacaaagatccggatctgaacgttaaaccaaaagagctggaacagcgcggcggggcgtattactccgacgcggcctgtgaagtgattaacgccatttacaatgataagcaggccgaacattacgtgaacgtgccgcaccatggccacgtggataacatcccggccgactgggcggtcgagatgacctgtacgctgggtcgcgacggtgcgaaaccgacgccgcgcatcacgcatttcgacgaaaaagtgctgggactgatttacaccattaaaggctttgaagtcgcggccagcgaagcggcaatcagcggtaaactggatgacgtgctgctggcgcttaacctgagcccgctgatccactccgatcgtgacgccgaacagctggcgcgtgagatgatccttgcgcacgagcagtggctgccaaactttgcggcgactatcgaaaaactgaaacagtaacgggagcggcttatggaacgcgtgttaatcgtcaatgccgatgattttggcctcagcaaagggcaaaactacggcattatcgaagcctgcaagaacggtctggtcacctccacgacggcgctggtcaacggcgcggcgatcggccacgctgcccagcttagccgctgcgtccctgagctggcggtggggatgcactttgtcctgacgctgggcgaaccgctgtcggcgatgccgggcttaacccgcgaaggtcgtctcggtaagtggatttggcagatggcggaagaggatagcctgccgctggatgagatcgcgcacgagctggagtgccagtaccggcgctttgtcgagctgtttggccatgagccgacgcatatcgacagccatcaccatgtgcatatgattgcgcagatttaccccatcgtcgcggcctttgcgcgcgagaagggggtggcgctgcggatcgatcggcaactggcgacgctgtcaggtttagcgcaggatgcggcgcgcagcagcgacgggtttaccagcgagttttacggggaaggggtttcggaagcgctgtttctgcaaaccctggatgcctctatccagcgtgatgagcgatcgctggaggtgatgtgccacccggcgttcgttgataacacgattatgggtagcgcctattgctacccgcgcctgaccgaactggacgtgctcaccgccgagtcgctgaagtatgcgattgccgagcgcggctaccggctcggcacctatcgcgatgtgtaagtaaagagaagtgagaagcccggcagaaatgccgggctttttttacgccgggatcgcggagattttggcgcttctcgaccacacccgatgcgccgccatcagggtaatcagcgcatccaccgacgcattatcgatggcgtccgtctcaacgatgccttcttccccctgactggcaacctgcagcggcgctttgcactgccgggcatcgcctgccagcagaatcggcttcaggtgtttataggcttccagcaggtagtagtggaaatcaccgttgttgctcaggctttgcagatcgccgccgggaacaatgaccgcgtccacggtaagcgatggcgacccggcaaaggtcccggccaccggcagctcggtaccgtcatcggcctgcactttccccattcgggaatagagtagtttggcatgcaccccgtgcgctttcagcgccttgagcagcgtcaggagctctttggcgaccggacgatcgttaagcagtaccgctaccacccggccttttacgtcaccgctgggaatagcgtacaggcttaacgtaggatcctttttcagaccgttaacatccggcggcggcgtgatgctgcgctgttcgtcggtgagctcaatacccagatttttacccaccgcctgagccagctgcaggtcgatatgcgccagctgatcgaccacccgctcgcggatccactccctgacgaccttgctcagctcgaagctgaatccgtcgataatatgctgctgctcaataggcgtctggctacgccagaacagcaggggctgcgagtaatattcgccaaacgacggactgcgctggcgaatcttttccccgtcaacccgctcggcataggattcaaagccgccgcgtttagcggccggcggcgtctcccgcggccagttatcgttgatggagttaggttcatagtttgccgggttggtatcaatatccatccggtgcatgccgtcacgctggaaattatggtacgggcaggtgggtttattgatcggaatttcatggaaattcggcccgccgaggcggctgatctgcgtatcggtataggagaagagtcggccctgcagcagcggatcgttgctgaagtctatccccggaacgatatgccctggatggaaggccgcctgttcgttttcggcaaagaagttgtccgggttgcgattgaggaccatcttaccgacgcgctgcaccgggaccagcgcttccggaatcagcttggtgggatccagcagatcgaaatcaaaagcaaactcgtcctcttccgggatcagctgtaagcccagctcgtactcaggataatcgccggcttcaatcgcttcccataaatcacggcggtggaaatcgggatcgcgaccggtcagcttttgcgactcgtcccataccagggaggctttgcccgcgaccggcttccagtgaaaacgtacgaaggtggctttaccttccgcgttaatcaggcggaaggtgtggatgccgaacccttccatcgtgcggtagctgcggggcagtccgcggtcggacatcgcccacatcacgttatgcagcgtttcgggctgcagtgagacgtaatcccagaacgtgtcgtgcgcgctttgcccctgcgggacggcccagtgcggctcgggtttgaccgcgtggacgaaatcagggaacttgatcgcgtcctgaataaaaaagatcggcgtgttgttgccgaccaggtcaaagatgccctcgtcggtataaaacttggtggcaaagccgcggatgtcgcgcaccgtatcggcggagcctgcgccgccctgaacggtggaaaaccggacgaagaccggcgtttttttctgcggatcgcagaggaaagccgctttggtgatatcgcttaaatcgctgtacgcctggaaatagccgtgcgcagcggagccgcgggcatggacgatcctctcaggaatgcgctcgtggtcaaaatgggtgattttttcgcgcaggataaaatcttccagcagcgtggggccgcgtttgcccgcgcgcagcgagttctggtcgtctgcgatgcgtacgccctgattggtggtgagcgcaaaatcctcgccgcctttacgctgtttttcaagggcatcgagcttttcgctgcgcgtatccggggctttcatactgcccggggcggtcggctcttcacctggggcggtgggatgcggcgtgggccgccagttctgatcttcgggggctaaggcatccagacctggttttgcttcccggtcgtcgtgaaccggtgattgatggggttgcgggttatggtgtttatcagacattgctcgctcctgctttcattgctgaaaatggtcgttgctaaaccaaaacccttctaattgtagaacatcatttcaagaatatatttttataagagttttactactaaagggccgcaagctgggggcgacgaaagggggctttttcggctatgataggggtttctgtttcccgctgtgtttagtgaatctatttgtgatgaaaccacttcgccaacaaaatcgtcaggtcattagctacgtgccgcgagtcgagcctgcgccgccggaacacgccgtcaaaatggatggttttcgcgacgtctgggttttgcggggtaaatacgttgcttttgtgctgatagacgaacattttcgtcgctccccgccgtttaacgtgccggaagcggcgcagcgctgggcgacgcaaatgaggcaggaaggtgaaatcgacgcctgaatgtgccgggcacaataaaaaaccgctgaaaatcagcggttttttgtttttaacaacctgaagtgcgggcccgcttagcggtgcgcgagctccgcgtcctcttcgctatcgagaatagctttatcggtttgacgcagccactggctggtcagggtaccggcggtcatggaaccgcttacgttcagcgcggtacggcccatatcaatcagcggctcaaccgagatcagcagcgccaccagcgtgaccggcaggcccatcgccggcaggacgatcagggcggcaaaggtcgcgccgccgcccacgcccgcgaccccggcggaactaacggtcacgatgcccaccagcgtcgcaatccacagcggatcgagcgggttaataccgacggtaggggcgaccatcacggcgagcatcgccggatagaggcccgcgcagccgttctgcccgatcgtggcgccgaacgatgcggagaagctggcgatagactccggcacgcccaggcgacgcgtttgcgcttccacgttcagcggaatagacgccgcgctggagcggctggtaaaggcgaaggtcaataccggccagactttacggaagtacttcagaggactcacgccgttgaccgccagcagcagaccgtgcaccacgaacatgatgcccagaccaatataggaggcgataacgaagctgccgagcttgatgatgtcctgcaggttagagcccgcgaccaccttggtcatcagcgccagcacgccgtacggcgttaactgcataaccaggcgcaccagcttcattacccaactctgcagcgtgtcgatggcggtgagtacgcgctggcctttggcgacgtcatctttcagcaatttcagcgccgcgacgccgaggaacgcggcgaagataaccacgctgataatcgacgttgggttcgcgccggtcagatcggcaaacgggtttttcggtacgaaagagaggatcagctgcgggacgctcaggtcggcgactttaccggcgtaattgctctgaatggcgttgaggcgggcggtctcagcgctgccctgaaccagcccttcggcggtcaggccaaacatattagtgaccagcaccccgaccagcgccgcaatcagcgtggtgaacagcagggttccaatactgaggaagctgattttacccagctgcgaggcattatgcagacgggcgaccgcgctcagaatggaggcgaaaaccagcggcatgacgatcatttgcagcagttgaacatagccgttaccgacgatattgaaccactggatagaatccttcagcaccgggctgtcggaaccatagataagctgtagcgccaggccgaagacaacgccgatcgccagaccgaccagcacttttttagcgaggctccactgtttatggcgggtttgggccagcgccaacagtaaaaccgcgaacacgactacgttcgctattaatggaaagttcatccccgttctcctgatatcttttattaccgggttggtcaataaccaactcttatgacggcaagggtagcagaaggcgttattcgttacttatattcaaatggaattgattataaccaattgaataattcgctggtttatcgtccaacctggtggctaattaagcgattaaaggtggtttgcaaagaattaatcatgtccgatgaccagcgaatggcgctgttttcggcaacgttttgcggcatccatacggcatagataaacagcgccatacacagcgcgcgctccagctggttacccttgcgcggtgcaagcaggggcaggcgaaaacgccagcggcagggccagagcagcggaacgcctgccggggtgagcatgtcggcgagaatatggctgaggtagccaagaaccaggccctgaaccgcgtctgccggcactatccagctttccggtactttcaatgagaaaatcgcgaccgcgccaaagactaccagcaggctatgggtgaagccgcgatggccaaaggcgcgcgctatcggttttgatatccagcttaatcgctgaccgagaaacgacttagggtgatcgatatccggcagcagacaggtcaggatggcggaaggaacgatgtgccaccagtcgccctgagccagcacgggggtcaattccgcgtttttcgcaaataccgcacaggcgatagagaagaggaggtggccttccgccgtcatgataaacaccctaaactgtcaattcatacagtatagggtttttatacagtgtgcggaagaggtgacggtgtaactctttgtcacaaaaacatcagcgtgccagccagccgccatctaccgccagcgtaaagccgctaatgtaatccgccgcccgggaggcgagaaaaaccaccggcccctgaaggtcatccggcacgccccagcgcccggccggaatacgatcgagaatcgctttgctgcgctcggcgtcttcacgcagttgctgagtattattggtagccatgtatcccggggcaatggcgttaacgttgatgcgatgccccgcccattcgttggccatcaggcgggtaatgcccagtacgccgctttttgacgcggtgtaggagggtacccgaatccccccctgaaaggagagcattgaggcaatgttaacaattttcccgccgtcaccttgctgaataaactgcctggcgaccgcctgtgaaagaaagaacaccgacttcagattcaggttaatcacctcgtcccagtctttttcgctaaaggagagcgcatcggcgcggcggatggttcccgcattgttgaccagaatatctacccggcccatggcggccacggcccgatcgacaatggtttcaatctcatcctgccggctcagatcggcctgaatagcggtaaagcgtcggcccagcgcctgaaccttctctgcggtttcatgggggatccggcgattcacgccgacgatatcgcacccggcctgcgcaaggcccagcgtcattccctggcccagcccggtatcacaacccgtcacgatagcgaccttgcccgtaaggtcaaaggcgttcagtaccatatgcacctctgtatgctgatttcacgcgttaaataacgccgttgagacaagcatagagggcgggagaagaaaaaacaaataaaaatgaaacgctgttttaattttgtgatgatgagacggtgccgctatctcatcatcagcggcaggattaaccgagcaggtcgctcagggtgagggattcaagggtggcaagcttcacgtccgccagcacgaagcgcggatcgcggctgttttccgcttccggtacgacgatagatcgcattcgggccgctttgctggcaatcatgccgttaaccgagtcttccagcgccacgcagtgcatcgggctggcgccgagtctggcggcgcagtccagatagacctgcgggtgcggtttgctgaacggcagcccttcggcggaagcgagggcgtcaaattgatcgcgcagttcaaacatggtgaggactttttccagcatccgcagcggcgaagccgacgccaggccgattttcaacccctgggctttgcacatcgccaccgcttcccgcgcaccggggaggagcggacgcgcttcttccaccagctggatggcgcggttgatgatccgcgcggtgacttcggcacgatccgggcctttccacggctgctgggcaaaccacagatcgacgactaaatcgatgcgcagccccaggatatcgggcatttcatggcggcggctgatatccaccccgaggcttgccatcacctccagctccgctttatcccacagcggctcagaatcaatcagtaaaccatccatatcaaaaatcgcggcgtgaatctggcgcctggctgacataagtccctctcctgtagcgtaagtagataacgaatcggcactcatggtatatcataccgcgcattattgggcgaaattcgccgacgaaggtagacttagggtagacaggcgtcttaacaaggggaacccatgacgtatcaacaagctggacgcgttgcagtacttaaacgtattttggggtgggtggtatttatcccggcggttatctcgacgctgatttccgtactgaagtttatgtacgagcacagtgagaaaaaaccgggcattgacgcggtgatgatggactttgctcatgtgatgattgagatgatgcgtttcaatacgccgttcctgaatttcttctggtacaactcgccgctgccggactttaagcacggtatgaatatcggcttctgggttatctatattctggtgttcgtcggcatggcgctacaggcctccggagcgcggatggggcgccaggcgaagtttctgcgcgagggcgttgaggatcagctgattctggagcaggcgaaaggggccgaagggctgacgcgcgaacaaatctctgaacgcgttgtggtgccgcgccataccatcctggtgcagtattttccgctatacgtcctgccggttattattatcgtgctgggctacttcttcttctctttactcggcgttctgtaaaggaccggcccggaagcgccgggccggcagaatcactgggcgggaagggcgcgcggtttaccctcattatctaccgcgacgtagataaacagcgcttcggttgctttgtagcgctggccgatgggttcagacgacaccttcttgacccacacttccatattgatggttatcgacgtattgccgcgcttcacgcagttggcgtagcagcacaccacgtcgccgaccgcgaccgggcgtaaaaaagtcatgccgtcgacgcgcacggtcacgacgcgaccgtgggcaatctctttggccataatcgccccgccaatatccatctgcgacatcagccagccgccgaaaatatcgccgttagcgttggtgtccgccggcatcgccagggtgcgtaataccaattcgcccttcggcgtaagatctgttgttgtcattctatactctgtactagtcaaagatgatcaggcggatgctactatgaaaatgacgctgagagaatagggaatacgcccgcgatagcgggcgtgaggggttagaaggagatcgtgacgccagcgtaataggcgcgacccggttcgttataggtcgaagccccttcgttttcacgataaatttgcttatcgaacaggttactgatcccggcgttcaggcgcagatctttcattagctgatagttgccgccgataccaaccactgaataggagcccacttcattggtggccagcacgccgttttcagtacgaatttccgcatattcccgcggtttctgccgaccgtacagagtccagttgacgttcgccgaaaacttgctggtcacctgccagtcgagcagggtattgatggtgtatttcggaataacggacagcgggtttccggtatctttgttttccgatttgatcatataagtggcattggtgcgccagctgagcgtatcggcaatgaccggaaccagcagcgtgccttcaaggccttcgacgaccgctttcccgccgttctcccactgcaggatattcgctccggtcgcggtattacccagtatctctgtgccggagacgatcttgtttttgtagtcgttgcgaaaccaggtgacgccggcgttgtaaccgttcaggttaaactcaaggccaatctccttattgatgctgatttccggatcgaggtccgggttacccaacagatagcagttgccatcggcaatacttatcgggcagccgttaccccgcgtagaaagcagatagccttcgctcgactgatacaggttcggcgctttaaatacccgggcgatgcccgctttgaccttaaacatatcgcccagatcctgcgccaggttcaggctcgggctccagttgctgccgaagtcgttatgatagtcgaagcgcagacccgggataatattggtgcccggcatcgcttcaatattgtcttccagatagataccggtcagggtggcgctgtttttagggctgcgttgtgaaggatcgccagaaatcccggggagagcatccgtggtggtggtggcctgcatggacgccggatcgtttagctcatcgcgattccattccatgcccagagtcagggtctgttcagcgagccagttgaaggggagattcacctctgcggttgagcgccacgactccaggcggctggtgtcatagacatcgctgttgatcatcccttcaacgcggccggtggtgccctcctgcaggcgggtattgttggttttttcgtagtagacgcccgccttcgactggccccagtcccagatcccgttgtaggtcaggccccaggtctgccgatatagccggttggtttcctgaccgtacagcgtatccaccaggccatttgggctcatattgctgttgctgtactgcgtatcgccggcataaatattgccctggcggctataggcgtagctaaaatccaggatctgctgcggggtaactttccacgacagcagggcgttaatatctttgttgcgtaccccttcgcggcccgccgcgtaagagccattttgcgcgcggttaatatcccaggcatcgggctccgttttgttgatgttgccgtacaaacgcatggtcagggcatctcccgccagcggtccgttgaggctgaagttagcccggttggtggcgccttctttattattttccggctgattggtatacagcgaaagcgagccgtgccagtcgttggtggggcgcttggtgatgatattgacaacgccgcccgcggcgcctgagccgtagcgcgctgcggcagggccgcgcagaacttcaatgcgttccaccatttccggcggtacccagttgctgtcgccgcgggtatcgcgctcgccgcgccagctatagcgcactgaattgcgggaggtgacgggcacgccgtcgataagaatcagcgtgttttccggtcccattccgcgaatgtcgatctgacggttgttgccgcggctgccgctggcgctgttgccggtcaggttgacgccgggcattttacggatgatttctgagagatcgttaaccgggggatctttagcaatatcttccgcagtgatgatcgagacgcccggctgctgcttcagcgcctcttcggcggtgccatgaaccaccatggtctccgtatcctgttccacctcttcggcgaagacccctgggctgagtaagcctgcaatggccagggccaggggcgttgctatgtgatttttctgcgttctcattataaatatccatatcaaatcatgaaaaaattgagatcgagaatatcaatgataatcattatcgtttcaataaagagacgctaatctccattaaatcctcacaattgccgcaactttccgacatgtggtagatatcatgaagaaaccggcgagcctgaaccctccggtttccgggcgcgttcgtcaggaggtgggggtttcgttgtcggttttttgacggcgtgtttgcgattggtaccacgccgggagctcagccagtctgatgccggtcgggacatagctttgtttcaggcaggctatgcgctgggaacgataaataccggtatagcccgagaccagccatgccaccacgcaggccagcgccgcgtaaacaccgatttccgcgccaaatagctcaatcgccatcagcgtcgaggcgatgggggtattcgccgcgccggcaaagacggcgacaaaacctatcccggccagaaaacctggcggcatatgcagcagcggcgccagcgcattgcccagcgtcgcgccgacgtaaaacagcggggtgacttcgccacctttaaatccgctgcctaaagagacaacggtgaagatcagtttgccgaagcagtcccacggcgccagcggatgctggaaagcgtccactatcaccggtatgcccaggccaatatagcgctctccgtgcagcagccagacggcgccggcaatcgccagtccgccaataaacggccgcagcggcgcgtagtgaatccgttttttcatgaaggcgccgaccgcatgcgtgctgtcggcgaaaatgcgcgccgcgaggccaaagcagcagccggcgataatgatggccagcagcgtccagagcgtcagcgtgggaaagccggtaataaagtagtgcgtatgctgcaccccccacatgatgccgacccgatcggcgataatcgcggcaaacagacagggaagaatggcgctgtagtccatccgtccgatagccaggacctcgagcccgaatagcgctccggcgagcggggtaccgaaaaccgaagagaaaccggcgctgatcccggccatcagtatcattcgccgggcatcgtcgttaaggcggaaaagggccgtaaaacggtcggcaatcgaggcacccatctgcaccgccgtgccttcacgcccgacggaggcgccaaacagatgagaaacaacggtaccaaaaaagaccagcggcgccatgcgcaagggaatgacgcgctgagggtcgtgaatctcttccagaatcaggttattgccggcctccacgcgggtgccgtagcgcaggtagatccaaccgacggcaaaaccggccaacggcaggagcccgataagccagcggtgagcttcacgcgttgccgtggtccactgcagtgagaaaagaaaaaacgccgatgccgtacccgccagcaccgcgatgataaaggcgaggagcagccattttccgaggaagaaaagcagagagagtgatgaaaagcggtttgcacgcatcgtcagttccttagaagattaaccttcccggacgcggtgcctgcaattcagatatgcctgcccattcccggtccgggaataaaaagcaggcatcattagccacatggcggttcaaggaggaatgccatctcctgtgagaaatagcttacattacgaatcgtttcagctgaagcgatttatgcggagaggggaaaagcgaagaacgcggcacgccgtccggcgtgccgtgggaaagccagcttagtggttgtcgtcctgcggcatatggcgatagatatacacgccgctcagcagggtgaataccagcgtcagggcggtcaaaccaaagaccttgaagttgacccagatattctgcggcagccagaaagcgatatagatattcgccagtccgcaaaggatgaaaaacaccgcccaggcaagattcagacgcgaccatacctgctgcggcagcgtcagctctttacccagcatgcgctggatcagcggcttcttcatcacccactggctaaacagcagcgcgctggcaaacagcacgtagataaccgtcaccttccatttaataaactcatcgttatggaagaagatggttaagccgccaaatacggccaccagcacaaaggtaatcagcgccattttctcgactttacgatagcgcacccagctgtaaatcagcacgatggcggtagcgataatcagcgcggtcgtcgcggcgtagatatcataaagcttgtagaatgcgaagaagactaccagcggtaaaaaatccagaaactgcttcatacatcgattccgtcgttcaggttggggcagggagcacccgccccggattaggttagttacgaatgagcatatacaagcgaaataaatagatcagcaacaatgcggagataagattgctgagggtatttattaccaccgcgccaacgtttggcgtcaggaccgcgaagctggaggcaaacagcagcagcagcgttttcgccagcagccagccgataatggccggcgccaccagacgtacgttggcccaggccagacgcatactgctacgcatggcgctgaaaatccccattttatcctgcaccagcataaccggtgcgaaagagagcacgatagccagcaggacgcccggcaccaccaccagcatcattcccatctgcacgataaacgtcgtcagcaggatcagcagcagcagctttggcagcaccggcgcagaagcgccgatcgcgcgcagggcgctgactcgctggccggcggagatcatctgaatcatgagcagaatgccgccggcaagaatggcgttacctaccagccctgagaaggtggaggccgcagacgcgcgcagcaggatttgctgctgctccggcgtcatgctctggaccagttcgaacagcccgccgctacccgccaggctatcgccctggctcagtattgacagctgctcttcactgggtgaaaaggcatggccaagtactaccgtaatgaacgcgcatagcagcgcaatcagcaggatagtaacgaactgattgcggaaaaagttcccggtgtcacggtagacggacttcgccgtgatagacatgcattctccttgagtattgcaggtgttaactagccggcgattgtaccgcaaatcgcggctgggtagcagtctctgctcctgcacgctaagtatatctttgtaaatagaagaggaaatcagcgacgcgctgccttgagtgtcataaaggaagaaatttgatatgacacgcttctcactgattgtattgagaaagtgaaaattaatctggatcaataaatgttaaatttgcccacttaatgtgatctatgttggatcaaacatacttcaatgtaggtatattctggcgctgaataaccataatgaggaagtgggtatgaaaaagttagcagcggcggttgttattctgagcagtctttccggcagcagcgtctgggcgcatgaagccggtgaattttttattcgcgcgggttcggcaacggtcagaccgaccgaaggcgcgggcggcacgttaggcagcctggggggctttaacgtcagcaataatacgcaactgggtttgacgttcacctatatggcaacggataacatcggcgttgaactgctggccgccacgccgttccgccataaagtcgggaccgcggcaaccggcaatattgcgaccgttcaccatttaccgccgacgctcatggcgcagtggtattttggcgactccagcagcaagctccgtccatacattggcgcgggtatcaactacacgaccttcttcgatgaaagcgtgaacgatacgggtaaaaagaccggcatatccgatctgagcctgaaagactcctggggggcggcaggacaggtggggatggactatctgattaaccgcgactggctgattaacatgtcggtgtggtacatggatatcgacaccaccgccaactataagctggcgggcgcgcagcagcacgacagcatccgtctggatccgtgggtgtttatgttctctgcgggataccggttctaaagtctcaggtaaagctggtcgcaatgaccagctttattgcacatcccaacgcgaagtccgctgccgcgattgccgatgcgtcatttgccgcaatcattccgcggaacgtccgcgtcaaccgctactcattaccccatttattcaggaataccgcgatatcatcgatgcgctgccgatcgatgcccgcttgtatggccatctctccctgcgcctcctcgctgatttcttcgttattcatcagccgcgtaatcagcagttgaaaatagcgcgccaggggctcacgttctgactcgctgacgggctcggcggactccgtcgaatactcatccgcaatgtcgtaatatttcagtggtacttcctcgtgcataaatcgctcccggttgacgttgtgcctgcattttctggcttgaatagtatcacccctgcctggctttagctcaggaacgcccagaaaaacgtatgactagcccacactatgcgcaacgggagggtaacgccccgctatcgaggcgtaaggatgttcgtgcgacatgcgctggcctttattaaggctattggtacggttgttccgtttggagcgttattaaacatctggtttctaatgctatgttatttgagctgcacgtttaatgagaaaactcttgccgcgacaccatcaattctgaaataaaagcaaatggcttgttggaataatacgccgtgctctatgatgcctctgcctgtaaatgtcttttcttttatatccagggtgccttatgagtaatttacttcttttatttatctccatcttgctattggttatttccgtatacaatggtgtggcttattttaatgagatcagaagacgacgtaatgtgtttcgttgtttttatacttctgacgatcgtgacgctaggtcataaactgttttcttttctctagcacgtttagaaacttattaagatcggtattgctttcaatcttaaagtcatgcatgacatttttcttgtgagaatacactgttttatagttaatgttcaatttattcgcgatttccagctggttaagcccaagactcagggcatgaacgacctttgactgcgcctgggtcagcgatttacagggacagttaatgcagcggctagtctgcgggcgatatcctgtttcattgtccgtccaggtgaatgcataaacatgaacttttattttatttcttatcgccggaagcgaatcacctttatataaaaacaaacaatctttagtacagttggggagttcattttccgaacattgattttccctttcctgaagaataaatagtaagcttttcgtggttttatatttcaattcatcatggcataaaaatatttctccgggtgccatttcggtgaatatgatctgagcctctgcgatgttaccgggggtgtagctatctacaaaaatgaggttttcctcatgggctacgctttcctgcatcagctgcttgatggcatatcgggtgtagatgtttttggtattgattaaaatggttatcataaataaagattcacatgcttatgaataaataaatcagaattaaaatagtgtcagtgcctgataatggccgtacgtaaaactaagaggtctaacggtaatgagtggtttaacaaactgcaaataagatattgtagaggtttttaaaaagcaatatttctatagaaaatgagaattcagatatttttcatgggaaaaatcttatctttcaaatagatagtgagcctttttgagttttttaactgagatcgtttttatttatttttgtcgtgcacgaaaagcttagtgtccgtattgctttactggtaagattttggctgaggatgaactggtcagggtattcttaaaggtaatgaaacgggcaatttttaatgaggtggtggagtggattgaatcccgcctgacaatcaatccggccgttgatgatatcgcctgtggggttgggtattcccggcgttttgtttataacctgttccatgagcatgccggccttcccgtcgggaaatatattcgcatgcgcagaatgacgcttgccgccggtaagctaaagctgactcagcaatcaatttcatcgattgcctgtttactgcactttgattctcatcaaaccttttcccgtgagtttaaaaaaacctttggccttagtcccggagcgtatcgggattcgacctgttgggatatgtcgttactttatcagaaggtggcaccgcagggcggcggcgtaccggcaccttacctttgttttcttgaaggacagtcgtttgctggatatggattcaactatacgctatctctgactgatgatatcgctacgcgaaaagaggtcacccggagaaaaattgccggcggcgcgacaggcgcagaccgcgatatctacattctctctgcatgttcccccgctgcgcacaatatatataaaacagcgatcaatgcattcatcggcacaccgtttaattcgcgggcggcttcttttcgtgaggtacgggtcgctaaacgtgggctataccttggtcttgaatttagtggctcatgggaagactttatttttctttcgaatcatgtctatctgaaataccttcctgaactgggtctgtatcgacgtgaaggttatgatatcgaacgttttgtccctcaggaaaatattcctttaggaaacgaccgacccatttacactctgcattattatgtcccggtcggttatatttagaagatggcagctttgcccagtaaaaagcgaaaattgactgccatgaacccgtctgcaggccattaatacgcatagacttatcaccacggcacgcgacatccgcgataatccagatactctaatccgggacgattttgtttttccagcagcacgttcaccagcgaggggatggtctccgccatggtgagcggggcgctctcgccgccaagagccgtgcggatccaccccggcgccatgaccaccatcggatgcgatacgctggcagggcgggcggcaaagctgcgcataaacatattcagcgcggctttgctcccgcgatacagctcgcgctgcccgccggtattattgctcaaactgccttgtcctgaagacataacgccaatcagcccctgcggcagcaccagcgcctgcagattttctataacccgcatcggcgcgagcgcgttggtcagcatgacgtgaataaactcttccgtcgcgatctcgccgatggtttgtgtgggatcgcggttggtggtgcccgcgttgacgaacagcatatccagcacgctatcggcaagcgcattgcgcagcgccgcgatcccgtcgctatcacaaatatccagcgcctcaatgcgcacccgtccaggataagcctcggccagatgatgcagcggcgtcgtttgtgagagatcgcgtacggtgccgatgacctgccagccatgcagcagaaactgttcagccatggcgtgcccaagcccgcgtgacgcgcctgcgatcaatactgttttaggggaagtgaccatgggcataactcctgagtaaatacatgatggggtaaatataggctggtgctgtagcaggcggaaggcgcagcatttgcaataataaagtgcatcagacgccttatcctggagtggagaaaaaatgaccgatcctgatttcaatttactggcggcgctggatgtattgttgagcgagaaaagcgttgccggggcggctaaacggcttgagctcagcgcttcggcgatgagccgcacgctgacgcgcctacggcaggtcaccggcgacccgctactggtcagagccgggcgaaacatggtgctgactccgcacgcagaaagtctgcaggcgcgggcaaaaaacgttgtctccgagatgcgcgcggtgctcgaggcttcgcctgcgccgctgagtttatcgaccctcgagaagcgatttactttgcgtaccaatgagggatttatagaagcttttggcccggcgctggtgaacgcggccgcgcgggaagcaccgggcgtgacgctggagtttgtcgctaagccggagaaagatgcccgatttttacgcgaggggcgggtggacctggaaattggcgtactgaaaaatatggggccggagatccgcctgcaggcgctgtttcgcgatcgttttgtcgtcgcgctggccaaaaaccatccgctggccgcctttgccgatatgtcgcgagaacaatttgtttccgtggggcacgtcattacctcccgtcgcgggttgatacgcgggccggttgatgatgcgctggcggcgtgtggcatgcgccgcaggattgccgcggtggtgcctggtttttccgccgcgctggccgtggcccgggattctcagctcatcgccgttgtcccggcctcctgcctgcagagcgcggcgggaaaagagatggtcgcttttcctctcccggtgagtacgccggagataacggtgtcacaaatgtggcatcctcgccaggagcatgaatcggcacatcgctggctaaggcagctggtgcgcagagtgtgtcgacaaccataaaaaaagcccgcacaggtgcgggcaaaaatactggaagcaatgtgagcaatgtcgtaccgaatacctgagctgtttgctcaactattcagtaatgagaaagataatatttctcatttaagatatcaaccccaacttttgtgcagaagcgatttttttaatcgacgacaaagacggtgcgtttctggctgtcgtcctgcggccacgccgtggcgacctcgcgaagcggccggggagtcgtggcgatagtcaatccgccggcgacggcggcctgcagcatctccccggtggcggccagcagctggggcacagaaaggctgccaattccgctgcccatcagctgcagcggcgaggatcgtagcaccgcgccattgagagagatatcggcggcggaaagggcaggtgaagaagctggaagcgcagcagctggtactcaagcagcccaatgcaaaagatcgccggattagcgaggtgacgctcagcgaagcggggcaggcgatgatcgatcgtatcgcgggagcaagaacgcggctgatgaatgaggtgctggccggatggacgcaagaagaggtgatggcgctgtttcgcctgacgcgtaaatacgccgacagcttacagctgaaataaccgcccggcccggggccggacggcaggtacgttaagccgctttagtggcggctttcaggcttcgggcgaaagccttgagttccgccagcatggcctgcggatcattcacgttccgttcgatgattttgacgatggctgagccggaaatcgcgccggccgcgccggcctcaatcgcggcggtaacctgctccggcgccgagatgccaaagccctgcagcggcggcgcggcgtggtactcggccagcttttcaatcagatgatgcagcggcagcgcggcgcggttttccgcgccggtcacgcccgcccgcgacagcaggtaagtataaccgcgaccgtaagaggctatctggcgcagcagatcgtcatcggcattgggcgggcagatgaaaatcggcgcgatattgtggcgcagcgcggcctggcggaacggcgcggactcttccacgggaacatcggcaaccagcacggaatcgacgcccgcgcgttcacacgcggcgtagaattcatcgatgccggggctgaacaccaggttggcgtacatcagcaggccgataggaatggtagggtgtttctggcgaatcgccgtcagcatttcgaagcactgcgcgggggtcaccccggcggcaaaagcgcgcagggtggcgtcctgaatggtcgggccatccgccagcgggtcggagaaaggaatgcccagctccagcgcgtcggcaccggcttcaatcagcgtatcgataattttcagcgactgttccggattcggatcgccgagggtgacgaagggaacaaacgcgccttcccggcgagctttcagttgtgcaaacagcgtctcataacgttccatcagatttcccctcgcgcttttaaaatatcatgtacggtgaagatgtctttatcgccgcggccggagaggttaaccaccagcagctgctctttttccgggttttcacgcatcattttcagcgcgtgcgccagggcgtgggaggattccagcgccgggataatcccttcatggcgtgatagctctttaaaggcctccagcgcttcgtcatcggtaatcgacacgtaatcggcgcggccaatgctgtttaaataagcatgctgcgggccgactgacgggaaatcgagcccggcggagatggagtaggactcctcaatctggccttcttcggtttgcatcatcggcgatttcataccgaagtagatgcccacacgaccgtgcttaagcggcgcgccgtgctcgccggactcaataccgtgacctgccggctccacgccaatcaggccaacagcggtttcgtcgataaaatcggcgaacatgccgatagcgttcgatccgccgccgacgcaggcgataaccgcatccggcaggcgaccttctttctcgaggatctgcgctttggtctcttcgccaatcatgcgctggaattcacgcacaatggtcgggaacgggtgcggacccgcggcggtgccgagcatatagtgggctttttcgtagctgccggaccagtcgcgcagggcctcgttgcaggcatctttcagcgtagaagagccgctatgaaccgggatcacttccgcccccatcaggcgcatgcggaaaacgttcggcgactggcgttcgatatccttcgcgcccatatagatgcggcacttcaggccgagcagggcgctggcgagggcagaggccacgccgtgctgaccggcgccggtttcggcgataatttccgttttgcccatccgtttcgccagcagagcctggccgagcacctggttagttttatgcgcaccgccgtgcagcaggtcttcacgtttcagatacagcgtcgtgcgggtgccttcagtgaggttgcggcatttggtcagcgccgtcggacgaccggcgtagtttttcagcaggtcggtaaattcggcctggaatgccggatctttttgcgcgctgacgaaggcttcttccagctggcgcagggcgggcatcaggatctgcggaacgtacatcccgccgaattcgccaaagtaggggttcagtaaagtactcattattgctccttaatatgcgcgcagcgtttgaaacacagaggacagcttgtcggcatctttaatacccggctgcgactctacgcctgaattaaaatcgagtccggcacagccgcttttggcggcttctacgcagttatcggcgctgaggccgcctgccagcatgacgttatgcaggtcctggccctgcagcagggaccagtcgaaacgctggccggtgccgccctgaccgttgtcgagaacgtatttatcgacatggcgcagctcgcgcggcggtagcgtttcacctacgctgagggctttccagatttgcaccttcggcggaagttcggcgcgcagggtatcaatataggtctggtcttcgctgccgtgcagctgtacggcggctaagtcgaggttttccgcccgggcgatcacttccgccatcggggtattgcggaatatgccgacatagctcagaggcgcgctggcgatcaccgcttgcgcctgcgcctcgttcaccgcgcgcggcgacgtcgggacaaaaatcaggccgccgtagaccgcgccggattcatacgccacctgggcatcctgggggcgggtcaggccgcagaccttattctcgccgagcagcacgcgcttcacggcggcgttgagatcggcgtgctccatcagcgctgagccaatcaggaaaccgttggcgaagtggctcagttcgcgcacttccgcgtaggtatggatgccggactcgctgatcaccgtgacatcgtgaccgagcttaggcgccagggtacgggtacggttgagatcaatcgacatatcgcgcagatcgcggttgttgatgccgactactttcgccttcagcgcaatcgcgcgctccagctcctcttcattactcacttcggtcagcacgcccatgttcaggctgtgcgcgacggcggagagctggcgatactgctcatcatccagcactgaaagcatcagcagacaggcgtcggcctggtagtagcgcgccaggtaaatctgataaggatcgatggtgaagtccttacagagaatcggctgcggcgcgaccttactgaccatcggcaggaaatcgaagctgccctggaaatatttctcatcgcacagcaccgagatagccgaggcgtagtgcttgtagacgccggcgatggccgccgggtcaaaatcttcgcgaatcaggccttttgatggcgaggcctttttgcactcgagaataaacgcggtgcgggttccggcgagggcatcataaaaattgcgctgcgtcggtaccacttcattttgaaaactggctaacggttgttgttgtttgcgggcttctacccaaatcgctttgtcggccacgatttttgctaaaacggtctgcattttttaccctcttgccgctaatgcggtcactctgtcataggccgctccgctatgcagcacatcgatgacttgctgcgcgttggccttcaggtcttcgtgtccatgtaaacgcatcaacatggcgacgttggcggcaacggcggcttcgtgagcggcttcacctttaccttgtagcaagcgcgtaagaatgtcacggttttcttccggcgtgccgcctgccagctgctcctgatggtaaggcgtcaggccaaagtcggcggcggtgagctggtagctcttgatttcgccatggttcagttccgcgaccaccgtcggcgcgtgcagcgacacttcatccataccgccgctatgcaccaccgcggcgcgctggtagcccagcacgcgcagggtttccgcaatcggcagcaccagttccgggctatagacgccaatcagcgccagcggcggatgagccgggttgatcagcggcccaagcacgttaaacagggtgcgggttttaagctgctgacggaccggcatcgcgtggcggaaaccggtgtggtacttcggtgcgaacaggaagcaaacgcccagttcatccagcgcctggcgagatttatcggcattcatatccaggttgataccgaacgccgccagcaggtcggaagaaccggatttactcgatacgctgcggttaccgtgcttcgcgaccttcaggccgcaggcggcggccacaaacgcgctggcggtcgaaatattgatactgttgctgccgtcgccgccggtaccgacgatgtcggcaaacggataatccggccgcgggaacggcgcggcgttttccagcagcgcggtggcggcgccggcgatttcctgcggatgctcaccacgtactttcatgctcaccagcgcggcggccagctgctcgggtttgacttcaccgcgcaccaccgcagagaacagctgatggctctcctgctggctcagggtttcggcctggtacagtttttccagaatcggctggagggtgttggtctgctccagcttctgcagcgcccaggccagggtttgctccagcaggcgtgccccctgggtggtcagaattgactcagggtggaactggaagccgcagacgcgatccgcgtcgtgacgcaccgccatcaccataccgttgaagtgggcgttgatggtgagtccggccgggatattgctgcccaccagcgagtggtagcgggcgaccggcagcggattgctcagtccggcaaacatcgcctggccatcgtgctcaatgcttgacgccttcccgtgaagaatttcaccggcctgaccgacgtagccgccgtaggcttcgacaatcgcctgatggccgaggcagataccgataatcggcagcttgccgcgcatgcgggtcagcagctccggcatgcagcccgcttcgctcggcgtccccggccccggagaaagcatcagtaccgggtttttcatggtgccgatgcgctcaatcagcgcctgcgccgggacggagttgcggtaaatcaccacgttatggccgttcgaacgcagctggtctgccaggttataggtaaaagagtcgatattatcgagcagcagaatgtcggccattagaaaatctccttcgcgtggtgggcctgggcgatagcgcgcagcaccgcgcgagctttattacgggtttcatccgcttctgactggggaacggagtcgagcacgataccggcgccggcctgcaccgtggcgatgccatcctgcacgtaggcggagcggatcacgatgcaggtatcgaggtcgccgtgggcggtaaagtagcccaccgcgccgccgtagctgccgcggcgtttgccttcagcggcggcgataagctgcatggcgcgcactttcggcgccccgctgagggtgcccatattcatacaggcgcggtaggcatgcagcacgtcaagatcgcggcgcagctcgccaaccacgcgggagacgaggtgcatcacaaaggagtagcggtcgactttggtcaggtcggcgacgtagcggctacccggggtacagatgcgcgcgaggtcgttacgcgcaaggtcgaccagcatcagatgctcggagagctctttatggtcggtgcgcatctccagctcaatgcggctgtcgagatcgcgatccagcgaaccatccgcgcggcggccgcgcgggcgggtaccggcaatgggatagatttcaatctggcgattggtggcatcgtacttgagagaactctccggcgacgcgccgaagagagtgaaatcgttgtcctgcataaagaacatgtacgggctcgggttgctcttcttcagcacatcataagcggccagcggcgacgggcagggcagcgagaagcggcgcgacggcacgacctgaaaaatctcgcccgcgcggatggcgcgctgcattttacgcacgacggcgccgtactcttcgtcgctctgatcgcagtcgcagctcatttcggcaaccgtggtcaccggcagcggcgccggcggctcgtttagctgctgacgaagctgagcgagccgctgtagcagacgctgtttttcgctttccagcggcgtgaacaggctcgcctggatacgggtatttttggtctgatggtcgataaccagcagcgtttccgccagatagaagcagtaatccgggcaggcggtgtcgctctccagcggcggcaggtcttcaaagccagcgaccaggtcataggcgaacaggccgccgaagaacatcgcttcgcgctcctcctgcgggacggttatcagatcctgcagcaggcgaaaagcgtcgaataccgagaatgaacacaggcgggcatcttcatccaacagcgcgctgaccggcgggaaggttaatacccggctatttggttgacgctggttatcgatgccggatggcagcgcgctatccagcagttcgagtaacgccgtaccgttggcggaaaacgcgtgaatggtgacagtgtcacctagcgcggtaatgcgcagcgcgctatccaccagcagcaggctctttaaatcatccttactgtcgatatccgcggattccagcagcagggtggctggacgcgcgccgcatagctggtggaacagcgccgtggggttttcccgatagatggcgtcgctggtgagaagctcgagtgccggttttgatgtttgcattattgttgtcgcctgttcgctataataatttgtccaataaaaagcccgctcattggcgggccgggtatctgtatgctgagtgcaaaacgcgatcacgccgcccgataacaggaggtgcgccaccagccgtgcagagtgatgaattgcgttttcattgttgataccccttcatgtgaacttgcgtactagttaactagtccgagggattaaagtcaacccctgtttgcagattttctctatcagtcggtatgatgatgcgcttattactatccttaatcacttaagctgcagaaccacagtcaatctgcctgtgacttaaagtatgacgggtaccggttcatgtccagcaggagtcatcttgagcaacaccaattacgcagtgatttacgacctgcacagccataccatcgcctctgacgggcgtctgactccagaagaacttgtccatcgcgcccaccagatgcgcgtcggcaccctggcgattaccgaccacgataccgtggcggcaattcccgcggctcagcgtgaaattgaacgtgccggtttaccgttggcgctgattaccggggtggaaatttccacgctgtgggaaaatcatgaaattcatattgtcgggctgaatatcgatatccatcatccggcgatgaccgcgctgctcgatgaacagaaagcgcgtcgccagatgcggggtcagcagatcgccgagcggctggaaaaagcgcggatccctggcgcctgggaaggggcgctgaagctggcggacggcggtgcggtgacgcgcggccattttgcccgttttctggtggaggccggctatgccaacaatatggctgacgtatttaagaagtatctggcgcgcgggaaaaccggttacgttccgcctcagtggtgtacaataaaacaagcgattgatgtcattcatcattctggcggtaaagcggtcattgcccatcccgggcgctacgatctctccgccaagtggttaaaacggctgttggcccattttagcgagcaggggggcgatgcgatggaggtggcgcagtgtcagcaggcgcctcacgagcgcgcacagcttgccgcttacgccgtgcagtatggcctggatgcctcgcaggggtctgattttcatcagccctgcccgtggatcgaactgggccgcaaactttggctacccgcgggcgtggaagggatctggcgcagttgggaagtggccgtagaacaaaattgagagggaagtatgagccagtttttttatatccatccggaaaatccacaggcgcggttaattaaccaggcggtggacattgtgcgtaaaggcggggtcatcgtctatccgaccgactccggctacgcgttaggctgcaaaattgaagataaaggcgcgatggagaggatttgccggatccgtaatctgccaaacggccacaacttcaccctgatgtgccgcgatttgtccgaactgtcgacctattcattcgttgataacgtggcctttcgtctgattaaaaacaataccccgggtaactacacgtttatcctcaagggcaccaaagaagttccgcgccgtctgctgcaggataagcgtaagaccatcggtatgcgcgtgccgtccaacccgattgcgcaaatgctgctggaaacgttgggcgagccgatgctctccacttcgttgatgctgccgggaagcgactttaccgaatccgacccggaagagatcaaagatcgtctggagaagcaggttgacctgattattcacggcggctatctgggccagcagccgaccacggttatcgacctcactgaagatgcgccggttgtggtgcgtgaaggcgtgggggacgtaacgccgttcctgtaatgacgtctgtttccatggaaggaatcgtcatgtaatgaatacccgctcgccgcttttatttgccgccgttcaacgcggcgcaatgccgcgcgccttttgatggttcatcctctgcaaaagaccctattgtgctacctggcttccatcagcgcgccatgcgcccggacggaggtgcgcggtaagttgtgctatgctcgtaacgcaaagaagcattcatcttaaagttcgtgtaccatgttcgcccacgcgagaaggcgtgtctctgttatgtctgctgtagcaacatagataacggcacgcgctgatgcaaaaaaattttacagaacagggtgttaggtttcattttgcctcgcgccctgtttttcgaagtataccagacgcctgggaaggcgacaccttaaggaagctcaatgagcgagaaattacaaaaagtgctggcccgcgctggccatggctcccgccgtgaaatcgaagccaaaatcgaagctggccgcgtcagcgtcgatggcaaaatcgccacgcttggcgatcgcgttgaaattgtcccgggtttaaaaattcgcatcgacggtcatctgatttcggtgaaagagtctgcggaacagatttgtcgcgtgctggcttactacaagccggaaggcgaactctgtacccgtaacgacccggaagggcgaccgacggtgttcgatcgtctgccaaagctgcgcggcgcgcgctggattgccgtcggtcgtcttgacgtcaacacctgcggcctgctgctgtttaccaccgacggtgaactggcgaaccgcctgatgcacccgagccgcgaagtggaacgtgaatacgcggtgcgcgtatttggccagatagatgatgacaagctgcgccagctctctcgcggcgtgcagctggaagacggcccggcggcgttcaaaaccatcaagtttaccggtggcgaagggattaaccagtggtacaacgtcacgctgaccgaaggccgtaaccgcgaagttcgccgcctgtgggaagccgttggcgtacaggtcagccgcctgatccgcgtgcgctacggcgatattctgctgccgaaaggcctgccgcgcggcggctacaccgagctggacctggcgcaaaccaactacctgcgcgaactggttgagcttacgccggaaaccacctctaaggtcgccgtcgaaaaggatcgccgtcgcatgaaggcgaatcagattcgccgcgcggttaagcgccacagccaggtgagcaataataataacaaccgtcgttccagcagccgtaataacggtaacggttaattattccagttccggcggtcaccgccggaattctccctcctgtgactcctttcacacttctgcataaagacaaaaaacaggaaatgcccggacaaataacgcaaagcggtgcgccaggcgacgccatatactgaggccactgattacattaacaggtagcctaaaatggaaacagcaggaaaactttcggcaagctatgtggttatcggcgttaaagaaaaaatagggtatggttttggcgatttcgcttctaatttatccttcggcttcgtttctctgtttttactttttttctataccaatatttacggcattagcgccgtacaggcgagcctgatctttgttattgcccgcgtggttgatgcggcctttaatattctgattggttttgccatcgataaaacccacagccgctacggtaagcttcgtccctggttgttgtatggttcaattccgctcggcttcttaacggtgctctgctttgtgcctttcggcggtgaggcgaaattctacttcgcactgatttcctatactatttattgcctggcctatacggcggtaaatacgccttattcggcgctgaccaaccgtttaacccagcatgaagcctcccgctcatcgctgtcggtataccggtttgtcctggcgattgttggctatctgattgtgtccactaccgcggacaggctgatttccccgtttagcgataagcagctgggatacgtcttcgccgtctcttgctttgcgctgctggcgacgtttttgttccttgcctgcttcgggatgaccaaagagcgcgttggtgaagaagaggaagagactccggcgccaacgctgcgggaaatgttgaaggcggtggcaggcaacgcgccgctaattaacctctccatgttcaccgtctttttttatattgcctataccgtgtggatggcgatcgctatttactttatcaaatatataattggtagcgaaggttttacttccaccttctttatgattcagtcggcggcttatattgtcggtaccgttatttcggaaaaaatcattgcgctgattggtaaaaagaaaatgacgctggtggcgctgttgatcggcattgcgggcgtactgatgcaatattttatcgctggcgacaatatctggctgatcatgaccggcgtgtgtctgtacagtattacgctggggatgggttttgtttcaatgtggtcaatgattgccgataccgtggaatatgccgagtggcaccatggggtgcgcaccgaaggcgcaatttacggtttctttaatttcatcaccaaaatagcgatggccatcggcggcggctgtgcgggctggatgctggactattaccactatgacgcgggcaacattaccgccagcgcgattaacggcattaacgtactgatgacgctatttcccggcgcgatgtttgccctcagcgcactgtttgtcgcctgctattcgctggatgaaaaaacctatcgcgatattgtgcaaaaaatcagcctgcgcaaacagaacgcgctttaacctcagggagccagagagatgaataacgattttaacaccaccctcgccgcgatgagcgcggaagaaaaagtggcgctgctgaccggcagcggcctgtggcggacggcctcgctgccgcagcacggtatcgaagatatcattatgaccgacggcacctacggcgtgcgctacagcagcgcgcagattgatggccgggaaaagtggagcatggatgattttatctcggtcatcacccaaaccgcagatcaggccagtgcggaagagcccgccgcgaaaggggggagtgaagcgctattcagcacttcgctaccggcgacctgttttcctaatggttccagcctggcctgcagctgggacgtggagctggtgcatcagatgggggaagcgctggggcgggagtgtcagcaaatgggcgtcgggatcctgctcgggccggggattaacattcgccgtacgccgctggccgggcgaggctatgaatattacgccgaagatccggtggtcagcggcgatattgccgctgcgctgatcaacggcctgcagcaggagggggttggcgccagcctgaaacactttgcggcgaacaactcggagtaccgccgcacggaaatggattcgattattgaagaacgggcgctgcgggaaatctatctggcgggtttccagcgcgcgattgcgaaatcccggccgtggacggtgatgtcttcctacaatcgtcttaacggcgtgcaaacctcccaggatccgtttttgctcacccaggttttgcgcgatgagtggggatatgaagggctggtgatgtccgactggtacggtattaaagatcgccccgcatcgctgatggcgggtaacgatctggcgatgcccgaaacccgccgcgataaacaaactctgctggcggcgattgaagccggagaggtgccgatggaggtggtggaccgcgcctgtctccgcatgctggaactgctcgacaaggtccagcgccatcgccgcccgcaaacgcgagccgattttatggcgcaccacgcgctggcgcagcggcttgccggtgaatccattgtcttgctgaaaaatgaagataatctgctgccgctgcgtccggagaaaacgccgcgcgtcgcggtgctgggtaaaccggctcaggagccggtgatccaggggtccggatgcgcgaccacggtgccgtatctgctcgatcggccgctggatgaaattttcgacctcgccggcgacgacttcagcgtctcctgggccgtgggcgcgccggacgatctgcgctgcgatgaacaggcgctggcgcaggcctgccgcgtcgcgcaggaagccgacgtggcggtgatcttcgtcagcaccgccgtaggcgaagatggcgagaacggcgatcgtcaggatctgcatattctgccggtgcacgaacggttaattcgcgaagtggcgacggtccagccgaatatcgtggtggtgctggcgaatagcgatgcggtggtgatgccgtggctcggcgagtgcaaagcgctgctggaaacgttctttgccgggcaagggatggggcgcgcggtggcggaaatcctcttcggccagcgtaacccctgcggcaaactgacggtaacggtacctaattccctggaggaaacgccggcctggctgcactatccgggcgaaaacctgcgtcatcattacggagaagggctttttgtcggctatcgctattatgataaacgtcgcatgacgccgcagtttccgtttggctttggcttaagctatacccggtttgcgtacgataatatcgcgctgtcagcctgccgtgcaggcgcaggcgagacgcttaccgtgtcgttcgacctgaccaactgcggagagtatgcgggcaaagagatcgtccagctgtacgttagcgcgccgaagggggagctgattcgcgaagtgcagtcattaaaagcgttcagcaaagtggcgctggccgccggagagacccgtcgcgtgagcctgcagctgcccattggcgagctggcctgctatcatccgggcctgggtgattgggtcgtgacgccgggcatctggcaggttcgcgtcggcgcctcatcccgggatctgccgttgatcgcggagattgaggtagattgtccgcagcggtacgtcccgctgcgcgatgataactctctacaacagctgatccagcagccggaggcctttgcccgcgtagtgaagctgattgccgataagagccagatgccggcggagcaggtgcgtgaaaaactgattcgcctggcgccggatctgttctgcgggctgctgattgcgctgaccgaattcctggcgctggatatcgaacgcgacgagcttaacgccgtgctggccggcgctcatcattgccaatgacaggagagtgcgcatgtttcctttttcagtgactcaccctcgttcggtcacccagagcggacgacaaacggcgaacagcggctacgagctgattgcctttgacgcggagaagctgaacgtgtttgccgcggaggttcgctactgcgagcctcactggcatccggctccggagctgattaccgtgctggcggggcgatttacccttgtcgtcggccagcaaagcctggagctggcgcagggagacatgctgtatatcaatgccgaagaggtccattcgctgagcgccgaggaggcgggcagccagctgctcaccgtacagttttcacccggcctgtttgatgaacttcatccctcgccgcagctggactggagtacctgcggacgaccttactctccggcagacagcgaggtacgccagcggctggcgaggctactggaacagctgatcgataaccacgcgccgtttcagcgtatcgcggcgatttatctgctgctggatgcggtcgtctccgcaggcaagccgacgcggcgcgccgaaagctcgctgcgcgacgaggcgatgatcaaaaaaggcattgattttatcaatcaacactttgatcagccgctgacgctgagcgaggtcgcctgccatagcgggatgagctactcgtggttctcgcggctgttcaaaaaggtgagccggtataattttaaagagtatctgacgctggtgcggctaaataaagcccgcaccctgctgcgcgatacccgcactcccatcacggagattagccacagctgcggctttcaggaacacaagtatctgatcgccgcctttaataaatactgcggcgtcacgccaaccgaataccgcaagcgcttcgtctcgcggcaaaatatgcgcgaaagcgaactggcgcagggggaggattgcctatgcctgccgctgaatcatgcgctgctcgagcggctggcggctagtagtcgatccccatctgcgctttgattccggcgtcaaaggcgtgcttcaccggacgcagctcgctgacggtatcggccagttcggtaatctcacggtggcagccgcggccggtaataatcaccgtctggtgcgccgggcggttgcgcagcgcggtaagcacctcttccagcggcaggtaatcataagccaccatgtaggttagctcgtccagcaaaacgaggtcgaggctttcatcagccagcatgcggcgcccgtgctcccagaccgcgaggcaggcggcggtgtcgctttcgcgatcctgcgtattccaggtaaagccggtcgccatcacctgaaactcaacgccgtgcggctcaagaaggttgcgctcgccgtttggccaggtacctttaataaactgtacgacggcggcttttttaccgtgtccgacggcgcgggtgacggtgccaaaagcggcggtggttttgcctttaccgttgccggtaaagacgatcacgatgccgcgctcttcctgcgcggcggcgacgcgagcgtcaactttatcttttacccgctgctggcgttcgcggtggcgttcatcactcattgtgcgattcctggtttgcggcccggctgggcgtcaaaggtcattcccgttttgcgacgactgtcgtcgcccatcagccacaggtaaaccggcatgatatcagcgggggttttcaatttttgcggatcttccgtcgggaacgcattggcgcgcattttggtgcgggtgccgcctgggttaatgcagttgacccgcagatgacggttctgatactcctcggccagcacctgcatcatgccctcagtggcgaatttcgacgcggcgtaagcgccccagttcgcgcgtccctggcggccgacgctggaagaggtaaagaccagcgaacccgattcggatttaagtaataaaggaagcagcgcctgggtgagcataaaggtgccgttcacgttcacctgcatcacctgctgccatacttccggcttttgttgatccatcgggcacacgtcgcccaacagacccgcgttgtgcagcaccccgtcgaggcgcgggtagtggatggctattttctgcgccagctgctggcactcctgcggcgtgcaggttaacaggtcgagagtaaaccagcgggcgggaatgccgcccgcctgctgtatttcgtgcgcgacgctgcgcagcttttcttcattgcggccgaccaggataacgctggcgctatagcgggaataggtcagggcggcttcacggccaatgccgtcgctggcgccggtaaccaggatgatgcggtcctgtaacaggtgacgttgcggttgatagtgcacggcgactcctcgggcgatctgctgacgatcgcgcttgctgttcggtatctcacttttgcgctttatgcctgaaagcgcccgctattgcaatcggcgaagcggaaactcttcgcggaattaatatcttgcaacgatttcatcgtcgctgaaaaaaacaggaaggcgcctcgcgtgcgacacaaagcacaaagacttctcgccgacggctgatgtacactgtgcgccaacgtcagcggtttacacaaggtgaaaacgtggaattacttgctcaatatggcctgtttttggccaaaatcgcgaccatcgttgtcgcaattgcggttatcgtcgccattattgttaacctgactcagcgcaaaaaacagcgcggcgagctgcgggtcaccaatcttagcgagcaatataaggagatgaaggaagagctggcggtttcgttgctcgatgggccgcagcagaagctgtggcataaagcgcaaaagaaaaagctcaagcaggaagcaaaggcgtcaaaggcgcgggcgaagctcggcacaccagagccggacgtcaaaccgcgcgtctgggtgctggattttaaaggcagtatggatgcccatgaagtcagcagcctgcgcgaagaaatcaccgccgttctggcggcggcaaaagcgcgcgaccaggtcgtcattcgccttgaaagcccaggcggcgtggttcacggttacggcctggcggcttcacagctacagcgcctgcgcgacaagcagatcccgttaacggtcgcggtcgataaagtcgcggccagcggcggctatatgatggcctgcgtggcgaacagaatcgtcagtgcaccctttgctatcctgggctctattggcgttgtggcgcaaattcccaacatcaatcgcttcctgaaaaataaagatatcgacattgagctgcatacggccgggcagtacaaacgcaccctgacgatgctgggtgaaaatacagaagaagggcggcagaaatttcgcgaagacctcaacgatactcatcggctgtttaaagattttgtccaccagatgcgccctgggctggatatcgagcaggtagcgacgggtgaacactggtacggcgttcaggcgctggaaaaaggccttgtggacgcggtggaaaccagcgatgaacttctgctggggctgatggataagcacgaggttatcagcgtgcgctatcagcagcgtaagaaaatgctcgagcggtttaccggcagcgcggcggaaagcgccgataagcttctgctgcgctggtggcagcgcgggcaaaagccgctgatgtaaacaaacaacgcgaggcttcggcctcgcgttgttgtcatggccctgcaggcagcggttaatccgccaggtgatacttatcagacagctcgtgtgcgaggtatttaaacatattaaataccgccgtactcttcgccgttggcagaccctgctcgtcaagatagaactcgccgctgaacaccagtacgccgttacgctgaacgacgtcggtggcctcgatcccggctaacgtatcttcatgttcgcgaatgagtttgttggctttttccagaagcgtctggcgatcgatgggttgggttgtaccttgcataaatgcctcctgtgtttcttcgcggctagtctacgccgcgcggcggcgaggggcaaattttccattgatcttgcaggggtaatcgcagaagcctaataaacatcagtttagtggcgggatttgcttttgcatgctaataaagttgcgtaacgaattttatcaggtacagtgtgacgctttcagcgatctggcaacagatttgcttgacattcggccaaaaattattcgtgctatgtcgcctggcgagaaaaagccagcaaactcagctatctggttttatggatgcgaaaccggtgcaaggggttgatatccatcgataacgacgcaacataggttgtgacgtgtcgccagtggatggtgaatcaatgtgcgatgtattcctggatgaatcaaattaggtaaaggtgaatatgggtaaagctctcgttatcgttgagtccccggcaaaagccaaaacgatcaataagtatctgggtaatgactacgtggttaagtccagcgtcggtcatatccgcgatttgccgaccagtggctcagcttccaaaaagagcgccgactctacctccaccaaaggggctaaaaagcctaagaaggatgaacgcggcgctctggtcaaccgtatgggcgtggacccgtggcatgactggaatgcgcactatgaaatactcccgggtaaagaaaaggtcgtttctgaactcaaacagctggcggaaaaagctgaccacatctatctcgcaaccgaccttgaccgcgaaggggaagccatcgcatggcacctgcgggaagttatcggcggtgatgaacagcgctatagccgcgtggtgttcaacgagatcacgaagaatgcgattcgtcaggctttcgaaaagccgggcgaactgaatattgaccgtgtcaacgctcagcaggcgcgccgttttatggatcgcgtggtgggctacatggtctctccactgctgtggaaaaaaattgcccgcggtctgtcagcaggccgcgtccagtcggttgcggtgcgtctggtggtcgagcgcgagcgcgaaattaaagcgttcgttccggaagagtactgggaagttgacgccagcaccacgacccctggcggcgatgcgttaccgctgcaggtcacgcataacggcgataagccgttccgtccggtaaaccgtgatgaaaccatggcggcggtcgcgctgcttgagaaagccagctacagcgtgctggagcgtgaagataagccgaccagcagcaagccgggcgcgccgtttatcacctccacgctgcagcaggccgccagcacgcgtcttggcttcggcgtgaagaaaaccatgatgatggcgcagcgtctctacgaagcgggccacattacctatatgcgtaccgactcgacgaacctgagccaggacgcgctgagcatggtgcgcggctacattggcgacaacttcggtaagaaatatctgccggagagcgcgaatcagtacgccagcaaagaaaactcgcaggaagcgcacgaggcgattcgtccatccgacgtcaacgtgctggccgaaacgttaaaagatatggaatctgatgcgcagaaactgtatcagctgatctggcgccagtttgtcgcctgtcagatgacgcctgcgcagtacgactccaccacgctgacggtgaaagccggcgatttcaaactgaaagcccgcggccgtacgctgcgctttgacggctggaccaaagtaatgccagccctgcgtaaaggcgatgaagaccgtactttaccgatggtcaataagggcgacagcctgagcctggtcgagctgacccctgcgcagcactttaccaagccgccggcgcgttttagcgaagcctcgctggttaaagagctggaaaaacgcggcatcggtcgtccgtccacctatgcgtcgatcatttcgaccattcaggatcgcggctacgtgcgggtggaaaaccgccgcttctatgcggaaaagatgggcgaaatcgtcaccgatcgtctggaagagaacttccgcgatctgatgaactatgatttcaccgcgcagatggaagaccgcctcgatcaggtggctaaccatcaggccgagtggaagcaggtcctcgacagcttcttcggagactttacctcgcagctgcagacggcagagaaagatccggaagagggcggcatgcagccgaacccaatggtgctgaccaccatcgactgcccaacctgcgggcgcaagatggggatccgtaccgccagcaccggcgtattcctcggctgctcgggctacgcgctgtcgccaaaagagcgctgtaaaaccaccattaacctggtgccggaaaacgaagtgctcaacgtgctggaaggcgatgacgctgaaaccaacgcgctgcgcgctaaacgccgctgtaaaaaatgcggcacggcgatggacagctacctcatcgatccgaagcgcaagctgcacgtctgcggtaataacccgacctgcgatggctacgagatcgaagagggcgagttccgcatcaagggctatgacggcccgatcgttgagtgtgaaaaatgtggctccgaaatgcacctgaagatggggcgttttggtaagtatatggcctgcaccaacgacgagtgtaaaaacacccgtaagatcctgcgtaacggggaagtggcgccgccgaaagaagatccggtgccgctgccggagctgccgtgcgagaaatcggacgcctactttgttctgcgcgatggcgcggcgggcgtcttcctggccgccaacaccttcccgaaatcgcgcgaaacc
